(19) United States
(12) Patent Application Publication
(10) Pub. No.: US 2019/0382740 A1
(43) Pub. Date: Dec. 19, 2019

(54) CHEMICAL-INDUCIBLE GENOME ENGINEERING TECHNOLOGY

(71) Applicants: AGENCY FOR SCIENCE, TECHNOLOGY AND RESEARCH, Singapore (SG); NANYANG TECHNOLOGICAL UNIVERSITY, Singapore (SG)

(72) Inventor: Meng How TAN, Singapore (SG)

(21) Appl. No.: 15/773,995

(22) PCT Filed: Nov. 7, 2016
(86) PCT No.: PCT/SG2016/050549

§ 371 Date: May 4, 2018

(30) Foreign Application Priority Data
Nov. 5, 2015 (SG) 10201509153Y

(51) Int. Cl. C12N 9/22; C12N 15/11; C07K 14/72

(52) U.S. Cl. CPC C12N 9/22; C12N 15/11; C12N 2310/20; C12N 2800/80; C07K 14/721

(57) ABSTRACT

The present disclosure refers to an endonuclease-based gene editing construct, wherein the construct comprises a CRISPR-associated endonuclease (such as Cas9 or Cpf1) or a derivative thereof and at least one or more hormone binding domains of the estrogen receptor (ERT2) or derivatives thereof. The present disclosure also describes a method of editing a genome of a host cell using the construct as disclosed herein, the method comprising transfecting the host cell with the nucleic acid sequence as defined herein and incubating the cell with an inducing agent.

### CROSS-REFERENCE TO RELATED APPLICATIONS

[0001] This application claims the benefit of priority of Singapore provisional application No. 10201509153Y, filed 5 Nov. 2015, the contents of it being hereby incorporated by reference in its entirety for all purposes.

### FIELD OF THE INVENTION

[0002] The present invention relates generally to the field of molecular biology. In particular, the present invention relates to genome engineering technology based on CRISPR-Cas9 systems.

### BACKGROUND OF THE INVENTION

[0003] There are many biomedical and biotechnological applications whereby it is imperative that the activity of enzymes capable of gene editing, for example Cas9, can be switched on and off as desired. For example, the ability to perturb regulatory networks in a particular tissue or at a specific time point is essential for understanding mammalian development. In cell signalling pathways, precise timing is also known to be of paramount importance. One possible approach to create a conditional genome editing system is to place the expression of, for example Cas9, under the control of an inducible promoter or a promoter that is active only in a particular biological context. However, such an approach suffers from several disadvantages. Firstly, the response time is typically slow, as transcription and translation have to occur before any protein activity can be observed. Secondly, the method can be cumbersome to implement in mammalian cells because additional factors (for example, the tetracycline transactivator protein in the case of the doxycycline-inducible promoter) may have to be introduced into the target cells. Thirdly, a context-specific promoter is also not readily generalizable. Fourthly, one of the key issues in the application of CRISPR-Cas9 technology to genome engineering is the specificity of the endonuclease.

[0004] An attractive strategy to circumvent the shortcomings of a promoter-based approach is to develop a Cas9 enzyme whose activity can be post-translationally controlled by an external input. Several laboratories have successfully engineered light-inducible systems based on Cas9 or transcription activator-like effectors (TALEs). However, specialized equipment that delivers blue light irradiation is currently uncommon, thereby restricting the adoption of such photo-activatable systems. A split Cas9 architecture was also recently reported, whereby Cas9 was divided into two fragments that can reassemble with the aid of rapamycin-binding dimerization domains to reconstitute the original enzymatic activity. Although this system relies on a simple chemical input, it can be inconvenient to implement due to the need to manipulate multiple Cas9 fragments. Another method depending on the chemical-triggered excision of a function-disrupting intein has been shown to modulate the activity of, for example, Cas9. However, the reported intein-Cas9 is leaky and exhibits some genome editing activity even in the absence of the chemical.

[0005] In view of the problems encountered in the art, there is a need for providing a genome engineering/editing system which is capable of being chemically controllable and/or inducible.

### SUMMARY

[0006] In one aspect, the present invention refers to an endonuclease-based gene editing construct, wherein the construct comprises the following components: a CRISPR-associated endonuclease (such as Cas9 or Cpf1) or a derivative thereof; and at least one or more hormone binding domains of the estrogen receptor (ERT2) or derivatives thereof.

[0007] In another aspect, the present invention refers to a nucleic acid sequence encoding the construct as disclosed herein.

[0008] In yet another aspect, the present invention refers to a vector comprising the nucleic acid sequence as disclosed herein.

[0009] In a further aspect, the present invention refers to a host cell comprising the vector as disclosed herein.

[0010] In one aspect, the present invention refers to a kit comprising the construct, as disclosed herein, and tamoxifen, and/or a derivative thereof

[0011] In another aspect, the present invention refers to a method of editing a genome of a host cell using the construct of any one of the preceding claims, the method comprising transfecting, nucleofecting, or electroporating the host cell with the nucleic acid sequence as disclosed herein; and incubating the cell of step (a) with an inducing agent.

[0012] In yet another aspect, the present invention refers to a method of editing a genome of a host cell using the construct of any one of the preceding claims, wherein the host cell comprising the nucleic acid sequence as disclosed herein is incubated with an inducing agent.

### BRIEF DESCRIPTION OF THE DRAWINGS

[0013] The invention will be better understood with reference to the detailed description when considered in conjunction with the non-limiting examples and the accompanying drawings, in which:

[0014] FIG. 1 | Building and testing a 4-HT-inducible Cas9. (a) Schematic of the ERT2-based strategy. A fusion of Cas9 (red) and ERT2 (crescent shape) was predicted to be sequestered in the cytoplasm. However, in the presence of an antagonist such as 4-HT (circle), the enzyme could enter the nucleus, form a complex with a sgRNA (brown and green), and generate a double-stranded break (triangles) in the cell's DNA (black). (b) Architectures of different Cas9-ERT2 fusions tested. Top, the original wild-type Cas9 construct, which contains a V5 epitope tag and two NLSs joined to Cas9. The orange fluorescent protein (OFP) is separated from Cas9 by a 2A self-cleaving peptide. Other rows represent five distinct configurations of NLS, ERT2, and Cas9 that were evaluated in this study. (c) Extent of genome modification determined by the Surveyor cleavage assay. Four genomic loci were tested, with each locus evaluated in at least two biological replicates, giving a total of eight independent experiments. Boxplots indicate the range of INDELs obtained from all the experiments. Wild-type Cas9 generated robust DNA modifications at all the targeted loci with or without 4-HT. In contrast, variant E, an ERT2-Cas9-ERT2 fusion, exhibited low activity in the absence of 4-HT but significantly higher activity in the presence of the chemical (**P<0.05, Student's t-test). (d) Extent of genome modification determined by Illumina deep sequencing. Wildtype Cas9 exhibited robust genome editing activity independent of tamoxifen. Consistent with the results from the Surveyor assay, fusion of the ERT2 domain to both the N-terminus and C-terminus of Cas9 could render the endonuclease activity of the enzyme to be significantly dependent on tamoxifen (**P<0.05, Student's t-test).

[0015] FIG. 2 | Optimization of the ERT2-Cas9-ERT2 architecture. (a) Left, placement of linkers and ERT2 copies evaluated in this study. Right, grouping of the 30 Cas9 variants tested on the basis of how they differ from the original variant E (see Supplementary Table 1 for details). OFP, orange fluorescent protein; 2A, self-cleaving peptide. (b) GFP disruption activity of the 30 Cas9 variants, wild-type Cas9, and the original variant E in the absence or presence of 4-HT. Boxes represent the range of values achieved by every variant within a particular group. Center lines, median; box limits, interquartile range; whiskers, 1.5× interquartile range. Each construct was tested in at least six biological replicates. n.s., not significant (P>0.25, Wilcoxon rank-sum test). (c) Detection of genome modification by Surveyor assay. Target site DNA was amplified from cells transfected with wild-type Cas9 or a Cas9 variant and treated with or without 4-HT (n=2 biological replicates per construct). n.s., not significant (P>0.25, Wilcoxon rank-sum test). (d) GPF reduction and INDEL percentages for the best-performing Cas9 variants. Each variant contained four copies of ERT2 and showed 4-HT-dependent activity, as assessed by GFP disruption assay (top), Surveyor assay (middle), and deep sequencing experiments (bottom). Transfection of wild-type Cas9 without and with the appropriate sgRNA served as negative and positive control, respectively.

[0016] FIG. 3 | Optimization of 4-HT treatment conditions. (a) Background activity of Cas9 variants 27, 29, and 30 at multiple genomic loci (P1 and P2, promoter sites; I1 and I2, intron sites), as determined by Surveyor assay to quantify INDEL frequency (n=1 replicate for variants 27 and 29; n=2 (VEGFA P1 and P2) or 3 (WAS I1 and I2, TAT, and FANCF) biological replicates for variant 30). (b) Intracellular localization of the Cas9 variants as determined by immunohistochemistry. Transfected HEK293 cells were untreated (0 h) or treated with 4-HT for 6 or 24 h before they were fixed and stained (n=7 biological replicates per construct and time point). At least 300 cells were counted for each sample. Although 4-HT treatment led to an increase in the percentage of cells containing nuclear protein for all three Cas9 constructs, variant 30 showed the lowest percentage of cells with nuclear Cas9 in the absence of 4-HT (**P<0.05, Wilcoxon rank-sum test); var, variant. Center lines, median; box limits, interquartile range; whiskers, 1.5× interquartile range. (c) Targeting efficiency of iCas (variant 30) across multiple genomic loci. Cells were analyzed by Surveyor assay after different durations of treatment with 1 μM 4-HT, applied 24 h after transfection (n≥2 biological replicates for each locus and time point; see Online Methods for details). (d) DN A-modification specificity of iCas with different durations of 4-HT treatment, analyzed by Surveyor assay for off-target modifications (off) at various loci. Blue indicates no cleavage observed; red indicates the presence of cleavage bands (see Table 2 for details)

[0017] FIG. 4 | Comparison of iCas with an alternative inducible promoter-based system. (a) Overview of experimental setup for the comparative study. STF3A cells were engineered to stably produce the transactivator protein (Tet-On 3G) required for a doxycycline-inducible promoter (P_{TRE3G}) to be functional. The hexagons with small circles at their corners represent retroviruses used to stably integrate the transactivator gene into the genome of the STF3A cell line. The upper concentric circles denote plasmids encoding iCas, while the lower concentric circles denote plasmids encoding wildtype Cas9 under the control of P_{TRE3G}. (b) Detection of genome modification at the CTNNB1 locus by Surveyor assay. Arrows indicate the expected cleavage bands. The full gel image is shown in FIG. 28. (c) Repression of Wnt signaling pathway assayed by a Wnt-responsive luciferase reporter. A plasmid encoding either iCas (light) or PTRE3G-Cas9 (dark) was transfected into STF3A-Tet-On cells with or without sgRNA. The transfected cells were treated with 4-HT or dox for 6 h and harvested after another 72 h. All luciferase readings were normalized to those from control samples (no sgRNA). Data represent mean±s.d. of 5 biological replicates (**P<0.005, ***P<0.001, Student's t-test). (d) Expression of CCND1, a Wnt target gene, measured by quantitative real-time PCR. Data represent mean±s.d. of 5 biological replicates (*P<0.05, Student's t-test).

[0018] FIG. 5 | Comparison of iCas with intein-Cas9 and split-Cas9. (a) Detection of genome modification at the EMX1 locus by Surveyor cleavage assay. Transfected HEK293 cells were treated with (+, solid lines) or without (−, dashed lines) chemical inducer and harvested at 12, 24, 48, 72, or 96 h after treatment. Data represent mean±s.e.m. of 4 (12, 24, 48, and 96 h) or 8 (72 h) biological replicates. (b) Switching ratios at the EMX1 locus upon addition of inducer. *P<0.1, **P<0.05, Student's t-test. Center lines, median; box limits, interquartile range; whiskers, 1.5× interquartile range. (c,d) Surveyor cleavage assay evaluating the ability of iCas, intein-Cas9, and split-Cas9 to edit two genomic loci simultaneously after 12 (c) or 24 h (d) of inducer treatment. Arrows indicate the expected cleavage bands. (Full gel images are shown in FIG. 29.)

[0019] FIG. 6 | Toggling the activity of iCas on and off. (a,b) Immunofluorescence images (a) and quantification (b) of iCas in HEK293-iCas cells either untreated (N.A.) or treated with 4-HT and then fixed at 0, 48, or 72 h after removal of 4-HT from the culture medium. DAPI, nuclear staining; V5, antibody specific for V5-tagged Cas9. Scale bar, 50 In (b), at least 300 cells were counted for each sample and time point. Data represent mean±s.d. from three biological replicates. n.s., not significant (P>0.25); **P<0.001, Student's t-test. (c) Surveyor assay detection of genome modification in HEK293 cells after two cycles of transfection and 4-HT treatment (4-HT 1 and 4-HT 2). A sgRNA targeting the WAS locus was transfected first, and a sgRNA targeting the ASXL2 locus second. Arrows indicate the expected cleavage bands. (The full gel image is shown in FIG. 30.)

[0020] FIG. 7 | Assessing the feasibility of an ERT2-based strategy to control the activity of Cas9. (a) Illumina deep sequencing was used to quantify the percentage of insertions and deletions (indels) generated at four targeted sites (n=2 biological replicates for each locus). Wildtype Cas9 exhibited robust genome editing activity independent of 4HT. In contrast, fusion of the ERT2 domain to both the N-terminus and C-terminus of Cas9 (variant E) rendered the endonuclease activity of the enzyme to be significantly dependent on 4HT (**P<0.05, Student's t-test). (b) The genome editing activity of variant E was evaluated with and without 1 μM 4HT by clonal Sanger sequencing (one replicate). Specifically, to estimate the INDEL frequency, PCR amplicons were cloned into the pUC19 vector and sequenced at least 24 clones for each sample. Consistent with the results from Surveyor assays and deep sequencing, an increase in genome modification was observed upon addition of 4HT for each of the genomic locus tested. However, it was noted that even in the absence of the chemical, variant E exhibited some leaky genome editing activity, indicating that the construct needed to be further optimized in order to reduce the background activity of the fusion protein.

[0021] FIG. 8 | Subcellular localization of an ERT2-Cas9-ERT2 fusion. Western blot analysis was performed to determine the subcellular distribution of both wildtype Cas9 and the Cas9 variant E (see FIG. 1b) in the presence or absence of 1 μM 4HT. Transfected HEK293 cells were separated into cytoplasmic and nuclear fractions using the REAP protocol1. Both the wildtype Cas9 protein and variant E were tagged with a V5 epitope and thus could be readily detected using an α-V5 antibody. 3PGDH served as a cytosolic marker, while total histone H3 served as a nuclear marker. Treatment with 1 μM 4HT for 24 hours caused a 3.4-fold increase in the nuclear-to-cytoplasmic ratio of the ERT2-Cas9-ERT2 protein but only a 1.2-fold increase for the wildtype Cas9 protein. W: whole cell lysate, N: nuclear fraction, C: cytoplasmic fraction.

[0022] FIG. 9 | GFP disruption assay for evaluating different fusion proteins of Cas9 and ERT2. (a) shows a schematic illustrating the principle behind the GFP disruption assay. Fluorescent cells are transfected with a plasmid encoding a Cas9 variant and a sgRNA targeting the eGFP gene. Upon addition of 4HT, the Cas9 variant translocates into the nucleus and cleaves the targeted genomic locus, thereby stimulating the error-prone, non-homologous end-joining (NHEJ) pathway for DNA repair. If a frame shift mutation occurs, the cell will show a loss of fluorescence signal. (b) shows flow cytometry graphs depicting representative data from a multitude of flow cytometry experiments. Within the HEK293-GFP cells, there are two sub-populations, namely GFP-high and GFP-intermediate cells. When the HEK293-GFP cells are transfected with an eGFP-targeting sgRNA and an active Cas9 enzyme, they lose fluorescence, as shown by an increase in the proportion of cells that are GFP-intermediate. Hence, to determine the activity of a Cas9 variant in the presence or absence of 4HT, mean GFP fluorescence intensity was measured from at least 10,000 live single successfully transfected (OFP-positive) cells for every sample.

[0023] FIG. 10 | Individual results from the evaluation of 30 different fusions of Cas9 and ERT2. (a) shows line graphs depicting results of the GFP disruption assay. Light yellow background shading indicates variants with two copies of ERT2 each, light blue shading indicates variants with three copies of ERT2 each, and light red shading indicates variants with four copies of ERT2 each. The dotted horizontal lines depict the median reductions in GFP intensity. Every construct was tested in at least six biological replicates. In the absence of the inducer, most of the Cas9 variants with three or four ERT2 domains exhibit a lower reduction in GFP signal than the median (9.2%). (b) shows line graphs depicting results of the Surveyor cleavage assay. Within each colour background shading, the variants are ranked in decreasing order of INDEL frequency observed without 4HT. The blue dotted horizontal line represents the median INDEL frequency observed in the absence of the inducer (2.0%), while the orange dotted horizontal line represents the median INDEL frequency observed in the presence of the inducer (10.4%) (n=2 biological replicates per construct). Most of the Cas9 variants with three or four ERT2 domains exhibit lower background activity (no 4HT present) than the median. (c) shows line graphs depicting the results of deep sequencing experiments. The orange or blue dotted horizontal line indicates the median INDEL frequency measured with or without 4HT respectively (n=2 biological replicates per construct). Notably, all the Cas9 variants with four copies of ERT2 displayed lower levels of leaky background activity than the median (2.8%).

[0024] FIG. 11 | Assessing the effectiveness of different optimization strategies. Data is shown as box plots, depicting the performance of four classes of Cas9 variants (see FIG. 2a), which was evaluated by Illumina deep sequencing. INDEL frequency was quantified from high throughput sequencing of DNA amplified from the EMX1 target locus in the absence or presence of 4HT (n=2 biological replicates per construct). A no-guide RNA control was included to determine the background measurement error. Without 4HT, Group 3 and 4 variants exhibited an activity level that is not above background (n.s.: not significant, P>0.25, Wilcoxon rank sum test).

[0025] FIG. 12 | Comparison of results from GFP disruption assay, Surveyor cleavage assay, and deep sequencing. To determine how well the results from the different assays agree with one another, the performance of the 30 tested Cas9 variants was rank ordered in terms of leakiness and level of induced activity for each of the three assays. The difference in rank between any two assays for every Cas9 variant was then calculated and the data shown as column graphs. Notably, it was found that the distribution of rank differences is clearly non-random (P<0.05, Kolmogorov-Smirnov test) and that for most of the Cas9 variants, the relative rankings from at least two of the assays are in close agreement with one another.

[0026] FIG. 13 | Flowchart for identifying the best-performing Cas9 variants. A total of 30 Cas9 variants, divided into four groups based on their architecture (see FIG. 2a), were evaluated for leakiness in activity and cutting efficiency. The different fusion proteins were assessed using the GFP disruption assay, Surveyor assay, and deep sequencing. Only eight of the variants showed less background editing activity than the original ERT2-Cas9-ERT2 protein (variant E) across all experiments. Out of these, three variants, all of which contained four copies of ERT2, showed a clear increase in editing activity upon the addition of 4HT to a level that is above the leakiness of variant E in all experiments.

[0027] FIG. 14 | Effect of 4HT dose on EMX1 targeting efficiency, as shown in three-dimensional column graphs. (a) The extent of genome modification was quantified using the Surveyor cleavage assay. Various concentrations of 4HT over different treatment durations were tested for each of the top three best-performing Cas9 variants (n=2 or 3 biological replicates for each data point, except for Variant 27's 16 hr and 48 hr time points where n=1 replicate). Editing activity appeared to show a general increase with longer durations of 4HT treatment for all three variants. (b) The extent of genome modification was quantified using Illumina deep sequencing. Due to the high sensitivity of sequencing, INDELs could be detected within 2 hours of 4HT treatment for all the three variants. Additionally, the extent of genome modification increased with longer periods of chemical treatment, agreeing with the results from the Surveyor assays (n=1 replicate for the 0 hour, 16 hour, and 24 hour time points; n=2 or 3 replicates for the 2 hour, 4 hour, 6 hour, and 8 hour time points).

[0028] FIG. 15| Titration of 4HT concentration for optimal induction of genome editing activity. The extent of genome modification at the EMX1 locus was measured using (a) the Surveyor assay and (b) deep sequencing for three different concentrations of 4HT. Overall, treatment with 10 nM 4HT consistently resulted in lower INDEL frequencies than either 100 nM or 1000 nM 4HT (**P<0.005, ***P<0.001, Wilcoxon rank sum test), indicating that at least 100 nM 4HT should be used for maximum activation of the inducible genome editing system.

[0029] FIG. 16 | Genome modification at the FANCF locus in HEK293 cells, the data represented as images showing the results and the concentration of gene induction. 24 hours after transfection with Cas9 variant 27, 29, or 30, the cells were either harvested immediately (0 hour time point) or were exposed to 0 nM, 100 nM or 1000 nM 4HT for another 24 hours before genomic DNA was isolated and analysed by the Surveyor assay. Arrows indicate the expected cleavage bands. Regardless of the Cas9 variant used, strong cleavage bands were observed when the cells were treated with 100 nM or 1000 nM 4HT. However, in the absence of 4HT, no cleavage band was detected for variant 30, while cuts were observed for variants 27 and 29. Furthermore, the leakiness in editing activity became more pronounced over time, as indicated by the increase in INDEL frequency from 2.5% to 7.7% for variant 27 and from 2.9% to 3.5% for variant 29.

[0030] FIG. 17 | Intracellular localization of the Cas9 variants. Micrographs of representative images are shown Immunohistochemical staining was utilised to determine the localization of the (ERT2)2-Cas9-(ERT2)2 proteins. 24 hours after transfection, the HEK293 cells were treated with 4HT for 0 hour, 6 hours, or 24 hours before fixing and staining them with anti-V5 antibody. Only the cells that were successfully stained (dark cells) were counted (scale bar=10 μm). Over 300 cells were counted for each sample and time point.

[0031] FIG. 18 | Genome modification at the TAT locus in different cancer cell lines. The efficiency of iCas was tested in the breast cancer cell line MCF7, as well as in the colorectal cancer cell lines DLD1 and HCT116, the results of which are shown as gel images. Based on the Surveyor assays, genome modifications were detected after the cells were treated with 1 μM 4HT for 6 hours. The INDEL frequency increased when the treatment duration was lengthened to 8 hours for all the cell lines tested. Arrows indicate the expected cleavage bands.

[0032] FIG. 19 | Specificity of iCas evaluated by Surveyor cleavage assay at multiple genomic loci. The specificity of iCas was tested using seven distinct guide RNAs (gRNAs), the results of which are shown in three-dimensional column graphs. It was found that iCas displayed variable specificity profiles for different gRNAs, which could be broadly divided into three groups: (a) highly specific, (b) moderately specific, and (c) unspecific. For the gRNAs targeting the EMX1 exonic locus and the second intronic site within the WAS gene, iCas exhibited almost no off-target effects for all durations of 4HT treatment tested. For the gRNAs targeting the first site within the VEGFA promoter, the TAT locus, and the FANCF locus, off-target effects were observed after 16 hours of 4HT treatment. For the gRNAs targeting the second site within the VEGFA promoter and the first intronic site within the WAS gene, off-target genome editing occurred at about the same time as the intended on-target genome modifications, regardless of how the duration of 4HT treatment was varied. (n≥2 replicates for each on-target site; n≥3 replicates for each EMX1 off-target site; n≥1 replicate for other off-target sites.)

[0033] FIG. 20 | Specificity of iCas evaluated by deep sequencing at multiple genomic loci. The gRNAs used were separated into three groups based on FIG. 17. The results from the deep sequencing experiments (n≥1 replicate for each data point) largely mirrored those obtained from the Surveyor assays. All the results are shown in three-dimensional column graphs. (a) The gRNAs targeting EMX1 and WAS intronic site 2 were highly specific. (b) The gRNAs targeting VEGFA promoter site 1 and TAT showed some off-target genome editing, which was generally less than the corresponding on-target modifications. However, unlike the Surveyor assay, only minimal off-target INDELS for the FANCF gRNA were observed using deep sequencing. (c) The gRNAs targeting VEGFA promoter site 2 and WAS intronic site 1 exhibited comparable on-target and off-target genome modifications, even with less than 8 hours of 4HT treatment. See Table 2 for details of the on-target and off-target sites.

[0034] FIG. 21| Specificity of iCas in comparison with wildtype Cas9. To evaluate the specificity of wildtype Cas9 and iCas, (a) the Surveyor assay and (b) deep sequencing, respectively, were used to analyse two known off-target sites (Off 1 and Off 2) of the EMX1-targeting sgRNA, the data of which is shown as column graphs. From the Surveyor assay, cleavage bands were observed for wildtype Cas9 at both off-target sites as previously reported. However, the iCas system did not induce any observable genome modification at the two sites after 24 hours treatment with 1 μM 4HT. From deep sequencing data, it was shown that iCas produced INDELs at levels barely above background level at both off-target sites, while wildtype Cas9 generated significantly higher INDEL frequencies (*P<0.005, Student's t-test). Error bars reflect the standard deviation from at least two biological replicates.

[0035] FIG. 22 | Comparison of iCas with PTRE3G-Cas9. (a) shows a schematic overview of experimental setup for the comparative study. A previously reported STF3A cell line was engineered to stably produce the transactivator protein (Tet-On 3G) required for a functional doxycycline (dox)-inducible promoter (P_{TRE3G}). The STF3A cells carry a TCF/Lef responsive luciferase reporter and also express high levels of Wnt3a. The hexagons with small circles at their corners represent retroviruses used to stably integrate the transactivator gene into the genome of the STF3A cell line. The upper concentric circles denote plasmids encoding iCas, while the lower concentric circles denote plasmids encoding wildtype Cas9 under the control of P_{TRE3G}. (b) shows Brightfield and fluorescent images, showing expression of fluorescent signal in the cells, showing successful cell transfection and expression of the tdTomato gene. To evaluate the STF3A-TetOn cell line, the engineered cells were transfected with a plasmid carrying the tdTomato gene under the control of a doxycycline-inducible promoter. The cells exhibited a strong fluorescence signal upon treatment with doxycycline for 24 hours. In contrast, there was very little fluorescence signal in the absence of the chemical. Various concentrations of doxycycline, from 50 to 1000 ng/ml, were tested, all of which yielded similar fluorescence intensities (scale bar=400 μm).

[0036] FIG. 23 | Levels of β-catenin transcript and protein. (a) shows column graphs depicting the expression of β-catenin as assessed by quantitative real-time PCR (qRT-PCR). HEK293 cells were transfected with either iCas or PTRE3G-Cas9 and then treated with the corresponding inducer for 6 hours. Subsequently, they were harvested for analysis after another 72 hours. When the cells were co-transfected with iCas and a sgRNA targeting β-catenin, a significant decrease in the transcript level of β-catenin (*P<0.05, Student's t-test) was observed. Such a decrease was not observed for cells transfected with an EMX1-targeting sgRNA or with P_{TRE3G}-Cas9 instead of iCas. Error bars reflect the standard deviation from at least three biological replicates. (b) shows images of Western blots, showing the detected levels of β-catenin protein. In cells that were co-transfected with iCas and a β-catenin-targeting sgRNA, the amount of β-catenin protein dropped to less than 20% of the original level. Such a large decrease was absent from cells that were not transfected with the β-catenin-targeting sgRNA or were transfected with PTRE3G-Cas9 instead of iCas.

[0037] FIG. 24 | Perturbation of Wnt signalling by iCas. The expression levels of two Wnt target genes, MYC and JUN, were measured using qRT-PCR and the data shown as column graphs. All measurements were normalized to those of the control samples (no sgRNA). The expression of MYC and JUN were significantly down-regulated in STF3A-TetOn cells that were transfected with both a plasmid encoding iCas and a sgRNA targeting β-catenin (*P<0.05, **P<0.005, Student's t-test). Error bars reflect the standard deviation from at least three biological replicates.

[0038] FIG. 25 | Benchmarking three different conditional genome editing technologies by the Surveyor cleavage assay. (a) shows line plots depicting the change in % of INDELs present over time for various systems. The TAT and WAS genomic loci were targeted using iCas, intein-Cas9, or split-Cas9. Transfected HEK293 cells were treated with (solid lines) or without (dotted lines) the appropriate chemical inducer and harvested at 12, 24, 48, 72, or 96 hours after treatment. Upon activation, the iCas technology generated INDELS more rapidly than the other two systems. Error bars reflect the SEM from at least three biological replicates. (b) shows box plots depicting the switching ratios (extent of genome modification in the presence of inducer divided by extent of genome modification in the absence of inducer) at the TAT and WAS loci. Overall, the iCas system was turned on with comparable or higher efficiencies than intein-Cas9 and split-Cas9 upon addition of the appropriate inducer (*P<0.1, Student's t-test).

[0039] FIG. 26 | Comparison of iCas with intein-Cas9 and split-Cas9. (a) shows line graphs depicting the quantification of INDEL frequency at the EMX1 (left panel), TAT (middle panel), and WAS loci (right panel) by deep sequencing. Transfected HEK293 cells were treated with (solid lines) or without (dotted lines) the appropriate chemical inducer and harvested at 12, 24, 48, 72, or 96 hours after treatment. The background activity of iCas and intein-Cas9 in the absence of 4HT were similar, but the iCas system exhibited higher editing activity upon addition of the inducer at all the three loci tested. Additionally, although the split-Cas9 architecture appeared to have the lowest amount of leakiness, its activity was switched on more slowly than iCas and intein-Cas9 after addition of the appropriate inducer. Notably, the frequency of INDELS generated by split-Cas9 after approximately 96 hours of induction could be readily achieved by iCas after only 12 hours of induction. Error bars reflect the SEM from at least three biological replicates. (b) shows box plots depicting the switching ratios at different genomic loci. Based on the deep sequencing measurements, the iCas system was turned on more efficiently than intein-Cas9 at all the loci tested upon addition of 4HT, while the split-Cas9 architecture outperformed intein-Cas9 at the WAS locus (*P<0.1, **P<0.05, ***P<0.01, Student's t-test). (c) shows gel images evaluating the ability of iCas, intein-Cas9, or split-Cas9 to edit two genomic loci (EMX1 and TCF7) simultaneously upon 24 hours of inducer treatment. Based on data gathered from the Surveyor cleavage assay, genome modification was observed at both the targeted loci for iCas. In contrast, intein-Cas9 only produced cuts at the EMX1 locus but not at the TCF7 locus, while no genome modification was detected for split-Cas9 at both the targeted loci. Arrows indicate the expected cleavage bands.

[0040] FIG. 27 | Temporal switching of iCas activity. (a) shows gel images depicting the results of the integration of the iCas system into HEK293 cells using retroviral transduction. To assess the functionality of this cell line, a lentivirus expressing a sgRNA targeting one of the coding exons of the PARP4 gene was generated, and HEK293-iCas cells were infected the virus. After puromycin selection and continuous passaging of the cells for at least two weeks, the cells were treated with or without 1 μM 4HT for 24 hours before harvesting them for analysis using the Surveyor assay. Cleavage bands (indicated by arrows) were observed for the treated cells, but not for the untreated cells, indicating that the level of leakiness is sufficiently low to minimize unwanted genome editing in the absence of the inducer. (b) shows a schematic outlining the experiment to toggle the activity of iCas on-off-on. When the cells are treated with 4HT, the iCas enzyme is expected to translocate into the nucleus and be able to edit the DNA (these cells are depicted as yellow). However, when the inducer has been removed for more than 72 hours, the iCas protein is expected to translocate out of the nucleus and thus no more editing will be anticipated.

[0041] FIG. 28 | Levels of iCas transcript in a stable line and during transfection. Column graphs here show the quantification of the expression of iCas using qRT-PCR. In comparison to the HEK293-iCas stable line, the transcript level of the editing enzyme was found to be more than a hundred fold higher, compared to when an iCas-bearing plasmid was transfected into wildtype HEK293 cells. Cells were harvested 72 hours after transfection (n=3 biological replicates).

[0042] FIG. 29 | Effect of enzyme dosage on the level of background activity, shown as gel images. Different amounts of an iCas-bearing plasmid were transfected together with an EMX1-targeting sgRNA into HEK293 cells. These cells were harvested 96 hours after transfection for the Surveyor cleavage assay. DNA modification was clearly observed when 1 μg of plasmid was utilised, even in the absence of the inducer. Importantly, background editing activity at the EMX1 locus was noticeably reduced when 0.5 μg or 0.25 μg plasmid was used instead. The switching ratio was improved from 2.83 to 4.16 and 7.96 respectively. Hence, these results indicate that the extent of leakiness may be modulated by adjusting the dosage of the iCas enzyme. Arrows indicate the height of the expected cleavage bands.

[0043] FIG. 30 | Detection of genome modification at the β-catenin locus using the Surveyor assay, the results of which are shown as an agarose gel image. The uncropped full gel image corresponding to the image shown in FIG. 4a is shown.

[0044] FIG. 31 | Evaluating the ability of iCas, intein-Cas9, or split-Cas9 to edit two genomic loci simultaneously, the results of which are shown as agarose gel images. (a) Cells were treated with the appropriate inducer for 12 hours. The uncropped full gel images corresponding to FIG. 5c are shown. (b) Cells were treated with the appropriate inducer for 24 hours. The uncropped full gel images corresponding to FIG. 5d are shown.

[0045] FIG. 32 | Detection of genome modification using the Surveyor cleavage assay to demonstrate that iCas activity could be switched on and off repeatedly, as shown in the presented gel image. The uncropped full gel image corresponding to FIG. 6c is shown.

### DETAILED DESCRIPTION OF THE PRESENT INVENTION

[0046] Recently, the development of genome editing technologies has opened up new avenues of biomedical research and holds the promise to accelerate knowledge discovery and drug development. The CRISPR-Cas9 system, for example, which is co-opted from bacteria, is particularly attractive because the elements that recognize the target genomic loci are simple single guide RNA (sgRNA) molecules, which bind the loci-of-interest by complementary base-pairing and are hence straightforward to design and synthesize. The sgRNA recruits the Cas9 nuclease to the DNA to create a double-stranded break. Much effort has been devoted to improving the specificity of the technology and various strategies have been proposed to mitigate off-target mutagenesis by the Cas9 enzyme.

[0047] In one aspect, the present invention refers to an endonuclease-based gene editing construct. As used herein, the term “endonuclease(s)” refers to enzymes that are capable of “cleaving”/“restricting”, that is inducing a strand break, in a section of a nucleic acid sequence. Depending on the type of endonuclease required, the endonuclease can be capable of cleaving within a single strand region of a nucleic acid sequence, a double strand region of a nucleic acid sequence or both. In general, endonucleases can be divided into 3 types, that is Type I, II and III, according to their mechanism of action. Type I and type III nucleases typically refer to large multi-subunit endonucleases that have both endonuclease and methylase activity (that is ATP [adenosine triphosphate] is required as a source of energy). Type II endonucleases, on the other hand, are simpler in structure and do not require an energy source such as ATP. The type of restriction site and specificity of the endonuclease to its particular restriction site, that is the site where the strand break is induced, varies between each endonuclease. It is also possible for an endonuclease to cleave the nucleic acid strand a number of base pairs upstream or downstream from the recognition site. For example, Type I endonucleases are known for cleaving random nucleic acid sequences up to 1000 or more base pairs upstream and/or downstream from the recognition site. Type III endonucleases, on the other hand, are known for cleaving nucleic acid sequences up to 25 or more base pairs from the recognition sites. Thus, in one example, the endonuclease is, but is not limited to, CRISPR-associated endonuclease, for example Cas9 and Cpf1, or derivatives thereof.

[0048] As used herein, the term “CRISPR” refers to Clustered regularly interspaced short palindromic repeats, which are segments of prokaryotic DNA containing short repetitions of base sequences. Each repetition can be followed by short segments of spacer DNA within a sequence. The term “Cas9” refers to CRISPR associated protein 9, which is an RNA-guided DNA endonuclease enzyme associated with the CRISPR (Clustered Regularly Interspaced Short Palindromic Repeats) type II adaptive immunity system in, for example, Streptococcus pyogenes, among other bacteria. S. pyogenes utilizes Cas9 to interrogate and cleave foreign DNA, such as invading bacteriophage DNA or plasmid DNA. Cas9 interrogates the foreign DNA by unwinding it and checking whether the foreign DNA is complementary to the 20 base pair spacer region of the guide RNA. If the interrogated DNA substrate is complementary to the 20 base pair spacer region of the guide RNA, Cas9 cleaves the invading DNA. Mechanistically speaking and without being bound by theory, the CRISPR-Cas9 mechanism has a number of parallels with mechanism of the RNA interference (RNAi) present in eukaryotes.

[0049] Thus, in one example, the CRISPR-associated endonuclease, or derivative thereof, is selected from the group consisting of a wild type CRISPR-associated protein 9 (Cas9), a mutated CRISPR-associated protein 9 (Cas9), a wild type Cpf1 (CRISPR from Prevotella and Francisella 1) protein, and a mutated Cpf1 protein, In the event where the protein is mutated, the mutant protein is to be functional. In another example, the wherein the CRISPR-associated protein 9 (Cas9), or derivative thereof, is selected from the group consisting of Streptococcus pyogenes, Streptococcus thermophiles, Listeria innocua, Staphylococcus aureus and Neisseria meningitidis. In yet another example, the CRISPR-associated protein 9 (Cas9), or derivative thereof, has at least 99%, at least 98%, at least 97%, at least 96%, at least 95%, at least 94%, at least 93%, at least 92%, at least 91%, at least 90%, at least 89%, at least 85%, at least 80%, at least 75%, sequence identity to SEQ ID NO: 1. In yet another example, the CRISPR-associated protein 9 (Cas9), or derivative thereof, has at least 95% sequence identity to SEQ ID NO: 1. In a further example, the Cpf1 protein, or derivative thereof, is selected from the group consisting of Acidaminococcus, Lachnospiraceae, Parcubacteria, Butyrivibrio proteoclasticus, Peregrinibacteria, Porphyromonas crevioricanis, Prevotella disiens, Moraxella bovoculi, Smithella, Leptospira inadai, Francisella novicida, Candidatus Methanoplasma termitum and Eubacterium eligens. In another example, the Cpf1 protein, or derivative thereof, has at least 99%, at least 98%, at least 97%, at least 96%, at least 95%, at least 94%, at least 93%, at least 92%, at least 91%, at least 90%, at least 89%, at least 85%, at least 80%, at least 75% sequence identity to SEQ ID NO: 2 or 3. In another example, the Cpf1 protein, or derivative thereof, has at least 95% sequence identity to SEQ ID NO: 2 or 3 The term “sequence identity” means that two nucleic acid or amino acid sequences are identical (i.e., on a nucleotide-by-nucleotide or residue-by-residue basis) over the comparison window. The term “percentage of sequence identity” is calculated by comparing two optimally aligned sequences over the window of comparison, determining the number of positions at which the identical nucleic acid base (e.g., A, T, C, G, U, or I) or residue occurs in both sequences to yield the number of matched positions, dividing the number of matched positions by the total number of positions in the comparison window (i.e., the window size), and multiplying the result by 100 to yield the percentage of sequence identity. In light of the above, it is understood to a person skilled in the art what is meant by a sequence identity of, for example, at least 95%.

[0050] The terms “upstream” or “downstream” refer relative positions in nucleic acid sequence, that is in a DNA or RNA sequence. Each strand of DNA or RNA has a 5′ end and a 3′ end, which are so named for the carbon position on the deoxyribose (or ribose) ring. By convention, upstream and downstream relate to the 5′ to 3′ direction in which RNA transcription takes place. In this case, upstream is toward the 5′ end of the RNA molecule and downstream is toward the 3′ end of the RNA molecule. When considering double-stranded DNA, upstream is toward the 5′ end of the coding strand for the gene in question and downstream is toward the 3′ end. Due to the anti-parallel nature of DNA, this means the 3′ end of the template strand is upstream of the gene and the 5′ end is downstream. It is noted that some genes on the same DNA molecule may be transcribed in opposite directions. This means the upstream and downstream areas of the molecule may change depending on which gene is used as the reference.

[0051] In order for such an endonuclease-based gene editing construct to be functional, other factors may be required, other than the endonuclease itself. In the case of, for example, CRISPR-associated endonucleases, such as Cas9 or Cpf1, a guide nucleic acid sequence is required in order to guide the endonucleases to the correct excision or editing loci. Therefore, the endonuclease needs to be capable of cleaving a nucleic acid in a specific section marked by the binding of, for example a guide nucleic acid sequence. In one example, a single strand guide nucleic acid sequence would bind to a complementary sequence within a genome or a stretch of nucleic acid. This binding of the guide sequence to the genome results in a double strand nucleic acid section, which is then recognized by the endonuclease and is then targeted for excision. Thus, in one example, the sequence of the guide nucleic acid sequence is complementary to the sequence of the intended restriction site. In another example, the sequence of the guide nucleic acid sequence is identical to the sequence of the intended restriction site. In another example, more than one nucleic acid guide sequences are used in conjunction with one or more nucleases. In another example, for example when multiple endonucleases are used, the guide sequences are specific for each endonuclease. In another example, where a single endonuclease and multiple guide sequences are used, the guide sequences must be so constructed that the endonuclease is capable of restricting the nucleic acid sequence at all of restriction sites. Therefore, by delivering, for example, a Cas9 endonuclease and appropriate guide nucleic acid sequence into a cell, the cell's genome can be cleaved at a desired location, thereby allowing existing genes to be removed and/or new genes to be added, or the function of existing genes to be modulated. In terms of the present invention, the process of gene editing becomes simplified in terms of procedure, because the sgRNA molecules guide the Cas9 nuclease to the (then double strand) loci within the genome, which is then excised from that location. This removes the double strand section from the loci in question, thereby creating, for example, a gene knock-out or knock-down for situations where the sgRNA binds to a functional part of a gene, or a gene knock-in in the event that a gene is introduced into the restriction site.

[0052] There are various ways of controlling or inducing certain aspects of a biological system. For example, the use of the lac operon system is frequently used for prokaryotic gene regulation, as it allows for an effective, inducible regulatory mechanism based on the absence or the presence of lactose. In general, such systems can be described using the terms “inducible” and “repressible” systems, whereby an inducible system is off unless there is the presence of a control molecule (also called an inducer) that allows for, in this case, gene expression. The molecule is said to “induce expression”. On the other hand, a repressible system is on except in the presence of some molecule (also called a co-repressor) that suppresses, in this case gene expression. The molecule is said to “repress expression”. In both cases, the manner by which the induction or repression happens is dependent on the control mechanisms, as well as differences between prokaryotic and eukaryotic cells. Another example of an inducible expression system is tetracycline controlled transcriptional activation, wherein the activation of transcriptional activity is dependent on the presence of tetracycline. Having said that, these “on and off” switches that are usually found in the field of protein expression can be used in other situations where control over a specific enzyme function is desired. In one example, the inducible system used is the ERT2-tamoxifen inducible system. This system allows for temporal control of the enzyme in questions, as the ERT-domain can be fused to any protein of interest, allowing reversible control over their activity by administrating or removing tamoxifen, (or derivatives thereof, for example, 4-hydroxytamoxifen), that is the inducing agent that either switches the control of the target protein on or off, depending on the concept used. For example, without being bound by theory, it is thought that in the constructs disclosed herein, the ERT2 domains effectively sequester the Cas9-dependent constructs outside of the nucleus, where they cannot perform their DNA editing activity. In the presence of an inducing agent, for example tamoxifen, however, the fusion protein can then rapidly translocate into the nucleus to perform its function.

[0053] As explained previously, the inducing agent used would depend on the type of inducible/repressible system used. Also, in order to be able to function as an inducing agent, the compound which is to function as an inducing agent need to be small enough in order to penetrate the cell membrane and thereby be present in the cell cytoplasm, or even the cell nucleus, depending on where the expressed protein is found. In one example, the construct as disclosed herein comprises the following components: a CRISPR-associated endonuclease (such as Cas9 or Cpf1) or a derivative thereof; and at least one or more hormone binding domains of the estrogen receptor (ERT2) or derivatives thereof. In one example, the one or more hormone binding domains of the estrogen receptor (ERT2) are located upstream or located downstream of the CRISPR-associated endonuclease. In another example, if there are two or more ERT2 present in the construct, the ERT2 are all located upstream, or all located downstream, or located both upstream and downstream of the CRISPR-associated endonuclease. In another example, the hormone binding domains of the estrogen receptor (ERT2) is mutated. In yet another example, the mutated hormone binding domain of the estrogen receptor (ERT2) is SEQ ID NO: 4, or derivatives, or variations thereof. In one example, the inducing agent is, but is not limited to, tamoxifen, 4-hydroxytamoxifen or derivatives thereof. In another example, the inducing agent is 4-hydroxytamoxifen.

[0054] The concentration of the inducing agent used or required in order to control the protein in question depends on the inducing agent used, as well as the time in which the host cell is exposed to the incubating agent. It will be appreciated that the inducing agent may not be used in concentrations that may result in a toxic or adverse effect in the host cell. Thus, in one example, the concentration of the inducing agent used is 0.5 μM, about 0.25 μM, about 1 μM, about 1000 nM, about 500 nM, about 250 nM, about 100 nM, about 50 nM, about 25 nM or about 10 nM. In another example, the concentration of the inducing agent used is a concentration of about 1 μM. It will also appreciated that the length of time a host cell is exposed to an incubating agent may have an effect on the length of time the inducible or repressible system is turned on, or off, respectively. Thus, in one example, the host cell is incubated with the inducing agent for about 2, about 3, about 4, about 5, about 5.5, about 6, about 6.5, about 7, about 7.5, about 8, about 8.5, about 9, about 12, about 16, about 23.5, about 24, about 24.5, about 36 or about 48 hours. In another example, the host cell is incubated with the inducing agent for about 4, about 6, about 8 or about 12 hours.

[0055] As used herein, the term “localization sequence” refers to an amino acid sequence which ‘tags’ a protein for transport into a specific compartment of the cell or the cell nucleus. One example of a localization sequence is a nuclear localization sequence or signal (NLS), which tags a protein for import into the nucleus of the cell. Another example is a nuclear export signal (NES), which has the opposite function in that it tags a protein for export out of the nucleus into the cytoplasm. Nuclear localization sequences can be divided into non-classical and classical NLSs. Classical nuclear localization sequences, that is NLSs that use the classical nuclear import cycle which may require the presence of an importin protein, can be further classified as either monopartite (which means to have a single part) or bipartite (to have more than one part, in this case two parts). For example, the sequence PKKKRKV in the SV40 Large T-antigen is considered to be a monopartite NLS. The NLS of nucleoplasmin, KR[PAATKKAGQA]KKKK, is an example of a bipartite signal, wherein two clusters of basic amino acids are present, separated by a spacer of about 10 amino acids. It is noted that this spacer may be variable in length. Examples of nuclear localization signals are, but are not limited to the nuclear localization signals of SV40 large T-Antigen (monopartite; PKKKRKV or CGGGPKKKRKVED), c-myc (monopartite; PAAKRVKLD), and nucleoplasmin (bipartite; AVKRPAATKKAGQAKKKKLD or KRPAATKKAGQAKKKK); EGL-13 (monopartite; MSRRRKANPTKLSENAKKLAKEVEN) and TUS-protein (monopartite; KLKIKRPVK). In another example, the nuclear localization signals (NLSs) are classical NLSs (cNLS) or proline-tyrosine (PY)-NLS. In yet another example, the nuclear localization signals (NLSs) are monopartite or bipartite NLSs. In a further example, the nuclear localization signal is, but is not limited to, the nuclear localization signal of the Large T-antigen of the Simian Vacuolating Virus 40 (SV40), nucleoplasmin, importin α, EGL-13, c-MYC, TUS, AR, PLSCR1, PEP, TPX2, RB, TP53, N1N2, PB2, CBP80, SRY, hnRNP A1, HRP1, Borna Disease Virus p10, Ty1 Integrase, and the Chelsky consensus sequence. As used herein, in regards to NLS, the term signal and sequence is used interchangeably. In yet another example, the nuclear localization sequence (NLS) is SEQ ID NO: 5 or SEQ ID NO: 6.

[0056] There are many other types of NLS, such as the acidic M9 domain of hnRNP A1, the sequence KIPIK in yeast transcription repressor Matα2, and the complex signals of U snRNPs. Most of these NLSs appear to be recognized directly by specific receptors of the importin β family without the intervention of an importin α-like protein and are therefore considered to be non-classical nuclear localization sequences. Another example of a localization sequence is mitochondrial targeting signal, which is a 10 to 70 long peptide that is usually present at the end of nascent proteins and which directs these nascent proteins to the mitochondria. It is usually found at the N-terminus and comprises of an alternating pattern of hydrophobic and positively charged amino acids, thereby usually forming an amphipathic helix. Mitochondrial targeting signals can also contain additional signals that subsequently direct the protein to different regions of the mitochondria, for example the mitochondrial matrix. Like many signal peptides, mitochondrial targeting signals may and are usually cleaved in vivo once targeting is complete. Yet another example of a non-classical nuclear localization protein is a proline tyrosine nuclear localization protein, so named for the presence of a PY-NLS motif, which is a proline-tyrosine amino acid pairing which allows the protein to bind to, for example, importin β2, and thereby facilitating its transport. Therefore, in another example, the localization sequence is a nuclear localization sequence, mitochondrial localization sequence or derivatives thereof. In one example, the mitochondrial localization sequence (MLS) is, but is not limited to, ATP5B, SOD2, COX8A, OTC, or TFAM. In another example, the mitochondrial localization sequence (MLS) is, but is not limited to, SEQ ID NO: 7, SEQ ID NO: 8, SEQ ID NO: 9, SEQ ID NO: 10 or SEQ ID NO: 11.

[0057] Thus, in one example, the construct as disclosed herein further comprises at least one localization sequence. In another example, the construct as disclosed herein comprises one or more localization sequences.

[0058] In terms of artificially generated fusion proteins, it is possible to attach various modifications, such as, for example, localization sequences, binding tags, selectable markers, optical markers and the like, to either the N-terminus, the C-terminus or both the N- and C-termini of a fusion peptide. This is possible even if in nature, for example, localization signals are usually found at the N-termini of proteins, as these are generally added towards the end of protein translation/expression. Therefore, the presently claimed construct can have one or more of said modifications at each terminus of the protein, provided the functionality of the modification is retained. That is, if, example, a localization signal is required to work in a biological setting in vitro, for example in protein overexpression, then the localization protein needs to be at the N-terminus of the protein, in accordance to its usual position in nature. The same can be said of other modifications, for example binding tags. Thus, in one example, the binding tag is located at either the N-terminus or the C-terminus of the construct, or at both ends of the construct. In another example, the binding tag is located at the N-terminus of the construct.

[0059] Protein or binding tags are peptide sequences which can be genetically added to the sequence of a recombinant protein prior to expression. Often, these tags are removable, and are intended to be so, by for example chemical agents or by enzymatic means, such as proteolysis or intein splicing, or by changing the physic-chemical environment of the protein, such as changing the pH value, certain solute concentrations in solution or a change of aqueous to non-aqueous solution. Binding tags are attached to proteins for various purposes, for example, but not limited to, purification via affinity, chromatographic purification, solubilization, detection (optical, immunological or otherwise), protein binding assays or to allow certain modifications of the protein, for example enzymatic modifications, or chemical modifications. Such binding tags may also be attached as multiples to the terminus of the protein in question, for example a single His-tag (HIS) may also be used as a triple His-tag (3×HIS) or a sextuple His-tag (6×HIS). Thus, in one example, the construct as described herein comprises a binding tag. In another example, the binding tag is, but is not limited to, a V5 epitope tag, a FLAG tag, a tandem FLAG-tag, a triple FLAG tag (3×FLAG), a Human influenza hemagglutinin (HA) tag, a tandem HA tag, a triple HA tag (3×HA), a sextuple Histidine tag (6×HIS), biotin, c-MYC, a Glutathione-S-transferase (GST) tag, a Strep-tag, a Strep-tag II, an S-tag (a peptide derived from pancreatic ribonuclease A (RNase A)), a natural histidine affinity tag (HAT), a Calmodulin-binding peptide (CBP) tag, a Streptavidin-binding peptide (SBP) tag, a Chitin-binding domain, a Maltose-binding protein (MBP) or derivatives thereof. In one example, the construct comprises a V5 epitope tag. In another example, the V5 epitope tag sequence is SEQ ID NO: 12 or derivatives thereof.

[0060] In one example, the construct, as disclosed herein, includes a self-cleaving peptide. Self-cleaving peptides, first discovered in picornaviruses, are peptides of between 19 to 22 amino acids in length and are usually found between two proteins in some members of the picornavirus family Using self-cleaving proteins, picornaviruses are capable of producing equimolar levels of multiple genes from the same mRNA. Having said that, such self-cleaving proteins are known to be found in other species of viruses and a person skilled in the art, based on the information provided herein, will be readily able to determine a suitable substitution for the self-cleaving protein disclosed herein, if required. The term “self-cleaving”, as used in the art, is not entirely accurate, as, without being bound by theory, these self-cleaving peptides are thought to function by inducing the ribosome to skip the synthesis of a peptide bond at the C-terminus of a 2A element, leading to separation between, for example, the end of the 2A sequence and the next peptide downstream. The “cleavage” of the peptide occurs between the glycine and proline residues found on the C-terminus of the resulting peptide, meaning the upstream cistron will have a few additional residues added to the end, while the downstream cistron will start with the proline residue. Thus, in one example, the construct as described herein comprises a self-cleaving peptide. In another example, the self-cleaving peptide is, but is not limited to, a 2A self-cleaving peptide. In another example, the 2A self-cleaving peptide is SEQ ID NO: 13 or derivative thereof.

[0061] As used herein, the term “selectable marker” refers to a marker that can be added to the peptide in question for selection purposes. The type of detection required would then dictate the type of marker that may be used. Thus, in one example, the construct as described herein comprises a selectable marker. In another example, the selectable marker is, but is not limited to, an imaging marker, a cell-surface marker, an antibiotic, an antibiotic resistance marker or derivatives thereof.

[0062] For example, if it is required to optically select the peptide in question, one choses an optical marker or an imaging marker, that is a marker that is capable of optical detection. Examples of such an optical or imaging marker are, but are not limited to, green fluorescent protein (GFP), enhanced green fluorescent protein (eGFP), superfold green fluorescent protein, red fluorescent protein (RFP), mCherry, orange fluorescent protein (OFP), cyan fluorescent protein (CFP), enhanced cyan fluorescent protein (eCFP), Cerulean, enhanced blue fluorescent protein (eBFP), yellow fluorescent protein (YFP), enhanced yellow fluorescent protein (eYFP), Venus, far-red fluorescent protein or derivatives thereof. If selection via, for example, resistance to a certain compound is required, an antibiotic resistant marker can be included in the peptide. Examples of such an antibiotic resistant marker are, but are not limited to, a drug-resistant cassette for puromycin, a drug-resistant cassette for blasticidin, a drug-resistant cassette for zeocin, a drug-resistant cassette for G418, a drug-resistant cassette for hygromycin B, a drug-resistant cassette for ampicillin, a drug-resistant cassette for kanamycin, a drug-resistant cassette for chloramphenicol, and derivatives thereof. Such selection markers are usually added to the genetic sequence for the protein in question and are therefore expressed concurrently when the protein is expressed.

[0063] A cell-surface marker is a protein that is usually found on the surface of the cell, which can be used to characterize a cell type and/or differentiate between different cell (sub)types. Such cell-surface markers can also include glycoproteins. One example of cell-surface markers are proteins that are named after the so-called cluster of differentiation. This cluster of differentiation is used to catalogue the various epitopes (hence, proteins) present on a cells surface, which are used as targets for, for example, monoclonal antibodies. The epitopes are then numbered and named “CDX”, with the “X” denoting a running catalogue number. Therefore, it is possible to positively identify a various cell types using one or more CD markers. In one example, the cell-surface marker is, but is not limited to, CD3, CD4, CD8, CD11a, CD11b, CD14, CD15, CD16, CD19, CD20, CD22, CD24, CD25, CD30, CD31, CD34, CD38, CD56, CD61, CD91, CD117, CD45, CD114, CD182, Foxp3 or derivatives thereof.

[0064] The present disclosure describes constructs, the general formula of which is according to formula I as shown below:

[chemical structure]

wherein the alphabets denote positions within the peptide sequence. In one example, A is absent, or is a mutated hormone binding domain of the estrogen receptor (ERT2), or the binding tag. In another example, B is the localization sequence, or derivatives thereof, or the binding tag, or absent. In another example, C₁ and C₂ are each independently any one of the localization sequences or derivatives thereof, or the mutated hormone binding domains of the estrogen receptor (ERT2). In yet another example, in the event that C₁ is one mutated hormone binding domain of the estrogen receptor (ERT2), then C₂ is another mutated hormone binding domain of the estrogen receptor (ERT2). In another example, C₂ is absent. In a further example, X is CRISPR-associated endonuclease or a derivative thereof. In yet another example, D is a mutated hormone binding domain of the estrogen receptor (ERT2), or the localization sequences or derivatives thereof. In one example, E is absent or is a mutated hormone binding domain of the estrogen receptor (ERT2), or the self-cleaving peptide. In another example, F is absent or is the self-cleaving peptide, or the selectable marker. In yet another example, G is absent or is the selectable marker.

[0065] In the above structure, the terms L¹ to L⁸ denote linker sequences between the positions within the peptide sequence. In one example, any of the linker sequences L¹, L², L³, L⁴, L⁵, L⁶, L⁷ or L⁸ are absent. In another example, one or more of the linker sequences L¹, L², L³, L⁴, L⁵, L⁶, L⁷ or L⁸ are absent. In yet another example, the linker sequences are between 1 to 5, between 4 to 8, between 5 to 10, between 10 to 20, between 20 to 25 or 0, 2, 3, 4, 5, 6, 7, 8, 9, 10, 11, 12, 13, 14, 15, 16, 17, 18, 19 or 20 amino acids in length.

[0066] A peptide can comprise natural amino acids, unnatural amino acids, or a combination of both unnatural and natural amino acids. As used herein, the term “natural amino acid” refers to proteinogenic amino acids, which are amino acids that are precursors to proteins. These amino acids are assembled during translation to result in a nascent protein. Presently, there are 23 proteinogenic amino acids known, 20 of which are found in the standard genetic code, along with an additional 3 amino acids (selenocysteine, pyrrolysine and N-formylmethionine) that can be incorporated into the peptide using special translation mechanisms. Humans are capable of synthesizing 12 of these from each other or from other molecules of intermediary metabolism. The other nine must be consumed (usually as their protein derivatives), and so they are called essential amino acids. The essential amino acids are histidine, isoleucine, leucine, lysine, methionine, phenylalanine, threonine, tryptophan, and valine (i.e. H, I, L, K, M, F, T, W, V). Unnatural, that is non-proteinogenic amino acids, are amino acids that are not naturally encoded or that are not found in the genetic code of any organisms. These unnatural amino acids, however, can be found in, for example, as intermediates in biosynthesis, post-translationally incorporated into protein, as components of, for example bacterial cell walls, neurotransmitters and toxins, and for example in natural and man-made pharmacological compounds. Thus, in one example, the linker sequences comprise natural or unnatural amino acids, or combinations of both. In another example, one or more, or all of the linker sequences comprise the amino acids A, E, G, P, S and T. In yet another example, one or more, or all of the linker sequences consist of the amino acids A, E, G, P, S and T. In one example, in the event that the linker sequence is absent, the neighbouring substituents then are bound by a peptide bond. In another example, the linker sequence L¹ is any one of PR, TG, TGPGPGGS, TGPGPGGSAGDTTGPGTGPG or TGGGS. In another example, the linker sequence L² is absent or, independently, any one of PRGGS, GGSPRGGS, PR, GGSPRGGS or TPGGPRGGS. In another example, the linker sequence L³ is any one of PG, SGSEGA, GASGSKTPG, SGSETPGTSESAGA, SGSETPGTGPGGA, SESATPESGA, GTSESATPESGGA, GGSGGSGA, GA, GGGS, TPESGA, SGSETPGTGA, SGSETPGTSEGA, PAG, PAGGGS, SGSETPGTPGGA, TPESGPGGA or GASGS. In yet another example, the linker sequence L⁴ is GGGS or absent. In a further example, the linker sequence L⁵ is any one of PAG or PAGGGS. In yet another example, the linker sequence L⁶ is GA or absent.

[0067] In the present disclosure, the terms polypeptide, peptide, and protein are used interchangeably. As used herein, the term “peptide” thus refers to a chain of amino acids which are connected via amide bonds. When the amino acids are alpha-amino acids, either the L-optical isomer or the D-optical isomer can be used, the L-isomers being preferred in nature. The term polypeptide or protein as used herein encompasses any amino acid sequence and includes, but may not be limited to, modified sequences such as glycoproteins. The term polypeptide is specifically intended to cover naturally occurring proteins, as well as those that are recombinantly or synthetically produced.

[0068] In one example, the structure is according to formula I, wherein A is absent or is a mutated hormone binding domain of the estrogen receptor (ERT2), or the binding tag; wherein B is the localization sequence or derivatives thereof, or the binding tag, or absent; wherein C₁ and C₂ are each independently any one of the localization sequences or derivatives thereof, or the mutated hormone binding domains of the estrogen receptor (ERT2); wherein when C₁ is one mutated hormone binding domain of the estrogen receptor (ERT2), C₂ is another mutated hormone binding domain of the estrogen receptor (ERT2); or wherein C₂ is absent; wherein X is CRISPR-associated endonuclease or a derivative thereof; wherein D is a mutated hormone binding domain of the estrogen receptor (ERT2), or the localization sequence or derivatives thereof; wherein E is absent or is a mutated hormone binding domain of the estrogen receptor (ERT2), or the self-cleaving peptide; wherein F is absent or is the self-cleaving peptide, or the selectable marker; wherein G is absent or is the selectable marker; wherein L¹, L², L³, L⁴, L⁵, L⁶, L⁷ and L⁸ are linker sequences; wherein any of the linkers L¹, L², L³, L⁴, L⁵, L⁶, L⁷ or L⁸ are absent; wherein the linkers sequences are between 1 to 5, between 4 to 8, between 5 to 10, between 10 to 20, between 20 to 25 or 0, 2, 3, 4, 5, 6, 7, 8, 9, 10, 11, 12, 13, 14, 15, 16, 17, 18, 19 or 20 amino acids long; wherein the linker sequences comprise the natural or unnatural amino acids; wherein the linker sequences comprise the amino acids A, E, G, P, S and T; wherein the linker sequences consist of the amino acids A, E, G, P, S and T; wherein if undefined, the linker sequence is absent, the neighbouring substituents are bound by a peptide bond; wherein L¹ is any one of PR, TG, TGPGPGGS, TGPGPGGSAGDTTGPGTGPG or TGGGS; wherein L² is absent or any one of PRGGS, GGSPRGGS, PR, GGSPRGGS or TPGGPRGGS; wherein L³ is any one of PG, SGSEGA, GASGSKTPG, SGSETPGTSESAGA, SGSETPGTGPGGA, SESATPESGA, GTSESATPESGGA, GGSGGSGA, GA, GGGS, TPESGA, SGSETPGTGA, SGSETPGTSEGA, PAG, PAGGGS, SGSETPGTPGGA, TPESGPGGA or GASGS; wherein L⁴ is GGGS or absent; wherein L⁵ is any one of PAG or PAGGGS; wherein L⁶ is GA or absent, wherein L⁷ and L⁸ are independently selected from the linkers as disclosed in any of L¹ to L⁶. In one example, A is absent. In another example, A is a mutated hormone binding domain of the estrogen receptor (ERT2). In yet another example, A is a binding tag.

[0069] In one example, B is the binding tag. In another example, B is a localization sequence.

[0070] In one example, C₁ is the localization sequence. In another example, C₁ is the mutated hormone binding domain of the estrogen receptor (ERT2).

[0071] In one example, C₂ is absent.

[0072] In one example, D is the localization sequence. In another example, D is a mutated hormone binding domain of the estrogen receptor (ERT2).

[0073] In one example, E is the self-cleaving peptide. In another example, E is the mutated hormone binding domain of the estrogen receptor (ERT2). In yet another example, E is absent.

[0074] In one example, F is the selectable marker. In another example, F is the self-cleaving peptide.

[0075] In one example, G is absent. In another example, G is the selectable marker.

[0076] In one example, X is the CRISPR-associated endonuclease or derivative thereof.

[0077] In a further example, A is absent, B is the binding tag, C₁ is the localization sequence and C₂ is absent. In yet another example, A is the mutated hormone binding domain of the estrogen receptor (ERT2), B is the binding tag, C₁ is the localization sequence and C₂ is absent. In a further example, A is the binding tag, B is the localization sequence, C₁ is the mutated hormone binding domain of the estrogen receptor (ERT2) and C₂ is absent. In yet another example, wherein D is the localization sequence, E is the self-cleaving peptide, F is the selectable marker and G is absent. In a further example, D is the localization sequence, E is the mutated hormone binding domain of the estrogen receptor (ERT2), F is the self-cleaving peptide and G is the selectable marker. In one example, D and E are each one mutated hormone binding domain of the estrogen receptor (ERT2). In another example, D is the mutated hormone binding domain of the estrogen receptor (ERT2) and E is absent. In yet another example, A is the mutated hormone binding domain of the estrogen receptor (ERT2), B is the binding tag, C₁ is the localization sequence and C₂ is absent, X is the CRISPR-associated endonuclease or derivative thereof, D is the localization sequence, E is the self-cleaving peptide, F is the selectable marker and G is absent. In a further example, A is the binding tag, B is the localization sequence, C₁ is the mutated hormone binding domain of the estrogen receptor (ERT2) and C₂ is absent, X is the CRISPR-associated endonuclease or derivative thereof, D is the localization sequence, E is the self-cleaving peptide, F is the selectable marker and G is absent. In yet another example, A is absent, B is the binding tag, C₁ is the localization sequence and C₂ is absent, X is the CRISPR-associated endonuclease or derivative thereof, D is the localization sequence, E is the mutated hormone binding domain of the estrogen receptor (ERT2), F is the self-cleaving peptide and G is the selectable marker. In one example, A is the mutated hormone binding domain of the estrogen receptor (ERT2), B is the binding tag, C₁ is the localization sequence and C₂ is absent, X is the CRISPR-associated endonuclease or derivative thereof, D is the localization sequence, E is the mutated hormone binding domain of the estrogen receptor (ERT2), F is the self-cleaving peptide and G is the selectable marker. In another example, A is the binding tag, B is the localization sequence, C₁ is the mutated hormone binding domain of the estrogen receptor (ERT2) and C₂ is absent, X is the CRISPR-associated endonuclease or derivative thereof, D is the localization sequence, E is the mutated hormone binding domain of the estrogen receptor (ERT2), F is the self-cleaving peptide and G is the selectable marker.

[0078] In another example, the construct comprising the following formula (II):

[chemical structure]

wherein A is absent; wherein B is a localization sequence or derivatives thereof, or the binding tag;

[0079] wherein both C₁ and C₂ are present or only C₁ is present; wherein C₁ and C₂ are each independently selected from the group consisting of the localization sequence, derivatives thereof of the localization sequence, and a mutated hormone binding domain of the estrogen receptor (ERT2); wherein when C is one mutated hormone binding domain of the estrogen receptor (ERT2), C₂ is another mutated hormone binding domain of the estrogen receptor (ERT2); wherein X is a CRISPR-associated endonuclease or a derivative thereof; wherein D is selected from the group consisting of a mutated hormone binding domain of the estrogen receptor (ERT2), the localization sequence and derivatives of the localization sequence; wherein E is absent or is selected from the group consisting of a mutated hormone binding domain of the estrogen receptor (ERT2) and a self-cleaving peptide; wherein F is absent or is selected from the group consisting of the self-cleaving peptide, the mutated hormone binding domain of the estrogen receptor (ERT2) and a selectable marker; wherein G is absent or is the selectable marker; wherein L¹, L², L³, L⁴, L⁵, L⁶, L⁷ and L⁸ are linker sequences; wherein at least one of the linker sequences is present; wherein each of the linkers sequences is independently between 1 to 25 amino acids long; wherein each linker sequence independently comprises natural or unnatural or a mixture of natural and unnatural amino acids; wherein the linker sequences comprise the amino acids A, E, G, P, S and T; wherein, if any one or more of the linker sequences of L¹ to L⁸ is absent, the neighbouring substituents are bound by a peptide bond; wherein L¹ is selected from the group consisting of PR, TG, TGPGPGGS, TGPGPGGSAGDTTGPGTGPG, TGPGGS, TGPGGSAGDTTGPGGS and TGGGS; wherein L² is selected from the group consisting of PRGGS, GGSPRGGS, PR, GGSPRGGS and TPGGPRGGS; wherein L³ is selected from the group consisting of PG, SGSEGA, GASGSKTPG, SGSETPGTSESAGA, SGSETPGTGPGGA, SESATPESGA, GTSESATPESGGA, GGSGGSGA, GA, GGGS, TPESGA, SGSETPGTGA, SGSETPGTSEGA, PAG, PAGGGS, SGSETPGTPGGA, TPESGPGGA and GASGS; wherein L⁴ is GGGS; wherein L⁵ and L⁷ are independently PAG, SGS or PAGGGS; wherein L⁶ is GA; wherein L⁸ is selected from the linkers as disclosed in any of L¹ to L⁶.

[0080] In one example, B is the localization sequence, C₁ is the mutated hormone binding domain of the estrogen receptor (ERT2) and C₂ is absent. In another example, D is a localization sequence and E and F are each a mutated hormone binding domain of the estrogen receptor (ERT2). In yet another example, A is absent, B is localization sequence, C₁ is the mutated hormone binding domain of the estrogen receptor (ERT2), C₂ is absent, X is a CRISPR-associated endonuclease or a derivative thereof, D is localization sequence, E is a mutated hormone binding domain of the estrogen receptor (ERT2) and F is absent. In a further example, B is a localization sequence, C₁ is the mutated hormone binding domain of the estrogen receptor (ERT2), C₂ is absent, X is a CRISPR-associated endonuclease or a derivative thereof, D is localization sequence and E and F are both each a mutated hormone binding domain of the estrogen receptor (ERT2). In another example, B is a localization sequence, C₁ and C₂ are each independently a mutated hormone binding domain of the estrogen receptor (ERT2), X is a CRISPR-associated endonuclease or a derivative thereof, D is localization sequence and E and F are both each a mutated hormone binding domain of the estrogen receptor (ERT2).

[0081] In one example, the construct, as disclosed herein, has at least 50%, 55%, 60%, 65%, 70%, 75%, 80%, 85%, 90%, 95%, 96%, 97%, 98% or 99% sequence identity to any one of SEQ ID NOs: 15 to 74. In another example, the construct, as disclosed herein, has a sequence identity of between 80% to 95% to any one of SEQ ID NOs: 15 to 74. In yet another example, the construct has a sequence identity of at least 90% to any one of SEQ ID NOs: 15 to 74.

[0082] As used herein, the term “variant” includes a reference to substantially similar sequences. Generally, nucleic acid sequence variants of the invention encode a polypeptide which retains qualitative biological activity in common with the polypeptide encoded by the “non-variant” nucleic acid sequence. Generally, polypeptide sequence variants of the invention also possess qualitative biological activity in common with the “non-variant” polypeptide. Further, these polypeptide sequence variants may have at least 25%, 30%, 35%, 40%, 45%, 50%, 55%, 60%, 65%, 70%, 75%, 80%, 85%, 90%, 95%, 96%, 97%, 98% or 99% sequence identity to the “non-variant” peptide. Variants may be made using, for example, the methods of protein engineering and site-directed mutagenesis as is well known in the art. Further, a variant peptide or protein may include analogues, wherein the term “analogue”, as used herein, with reference to a peptide, means a peptide which is a derivative of a peptide of the invention, whereby the term “derivative” comprises a polypeptide that has addition, deletion, substitution of one or more amino acids compared to the “non-variant” peptide, such that the polypeptide retains substantially the same function as the non-variant peptide. The substitution may be one or more conservative amino acid substitutions. The term “derivative” or “derivation” also refer to compounds other than amino acids, which have been modified from the original compound. In some example, these derivatives retain the same or have increased desired function. In regards to chemical compounds, the term “derivative” refers to a chemical substance derived from another substance, either directly or by modification or partial substitution. In this case, chemical derivatives but do not necessarily retain their original function. The term “conservative amino acid substitution” as used herein refers to a substitution or replacement of one amino acid for another amino acid with similar properties within a peptide chain (primary sequence of a protein). For example, the substitution of the charged amino acid glutamic acid (Glu) for the similarly charged amino acid aspartic acid (Asp) would be a conservative amino acid substitution. Conservative amino acid substitution tables providing functionally similar amino acids are well known to one of ordinary skill in the art. The following six groups are examples of amino acids that are considered to be conservative substitutions for one another:

### 1) Alanine (A), Serine (S), Threonine (T);

[0083] 2) Aspartic acid (D), Glutamic acid (E);

### 3) Asparagine (N), Glutamine (Q);

### 4) Arginine (R), Lysine (K);

### 5) Isoleucine (I), Leucine (L), Methionine (M), Valine (V); and

### 6) Phenylalanine (F), Tyrosine (Y), Tryptophan (W).

[0084] A non-conservative amino acid substitution can result from changes in: (a) the structure of the amino acid backbone in the area of the substitution; (b) the charge or hydrophobicity of the amino acid; or (c) the bulk of an amino acid side chain. Substitutions generally expected to produce the greatest changes in protein properties are those in which: (a) a hydrophilic residue is substituted for (or by) a hydrophobic residue; (b) a proline is substituted for (or by) any other residue; (c) a residue having a bulky side chain, e.g., phenylalanine, is substituted for (or by) one not having a side chain, e.g., glycine; or (d) a residue having an electropositive side chain, e.g., lysyl, arginyl, or histadyl, is substituted for (or by) an electronegative residue, e.g., glutamyl or aspartyl.

[0085] As used herein, the term “mutation” or grammatical variants thereof, in general, relates to an altered genetic sequence which results in the gene coding for a non-functioning protein, or a protein with substantially reduced, or altered function. The term “mutation” also relates to a modification of the genome or part of a nucleic acid sequence of any biological organism, virus or extra-chromosomal genetic element, or any genetic element that has been included in the nucleic acid sequence of a fusion protein. The mutation can be performed by replacing one nucleotide by another in the nucleic acid sequence of any of the genetic elements, thus creating a different amino acid in the position where the nucleotide was replaced. The techniques in order to achieve such mutations are well known to a person skilled in the art. For example, the mutation can be induced artificially using, but not limited to, chemicals, PCR reactions, and radiation. When artificially created, in the context of the invention, a mutation is by extension, the replacement of an amino acid encoded by a given nucleic acid sequence to another amino acid in a nucleic acid sequence or a genetic element. Thus, the section of the construct, as disclosed herein, containing the full, unchanged sequences for, for example, the hormone binding domain of the estrogen receptor (ERT2), would be considered to contain the wild type hormone binding domain of the estrogen receptor (ERT2), while sections of the construct carrying a mutation in the hormone binding domain of the estrogen receptor (ERT2) are termed mutated hormone binding domain of the estrogen receptor (ERT2).

[0086] The present disclosed describes constructs for the expression of fusion proteins having the desired capability of genome engineering, that is genome editing. In order for such fusion proteins to be expressed, the constructs, as disclosed herein, need to be brought into a cell for protein expression. Thus, in one example, a host cell is transfected with the nucleic acid sequence as described herein, thereby resulting in the expression of the desired protein within the cell. In another example, the transfection is done via nucleofection or electroporation. In another example, the present disclosure describes a nucleic acid sequence encoding any one of the constructs as disclosed herein. In yet another example, there is disclosed a vector comprising the nucleic acid sequence of a construct as disclosed herein. In a further example, a host cell comprising the vector as disclosed herein is described. In one example, the host cell is a mammalian cell. In another example, the mammalian cell is, but is not limited to, mouse, horse, sheep, pig, cow, hamster or human. In another example, the host cell is bacterial.

[0087] Any or all of the components, as described herein, may be provided in the form of a kit. Thus, in one example, a kit comprising the construct as disclosed herein and an inducing agent is described. In another example, the kit comprises tamoxifen as an inducing agent, and/or a derivative thereof.

[0088] Described herein are also methods for using the claimed construct for genome editing. Thus, in one example, there is disclosed a method of editing a genome of a host cell using the construct as disclosed herein, wherein the host cell, comprising the nucleic acid sequence are as defined herein, is incubated with an inducing agent. Also disclosed herein is a method of editing a genome of a host cell using the construct as defined herein, wherein the method comprises transfecting the host cell with the nucleic acid sequence as defined herein; and incubating the cell with an inducing agent. IN another example, the transfection can be done using, for example, nucleofection, or electroporation.

[0089] The invention illustratively described herein may suitably be practiced in the absence of any element or elements, limitation or limitations, not specifically disclosed herein. Thus, for example, the terms “comprising”, “including”, “containing”, etc. shall be read expansively and without limitation. Additionally, the terms and expressions employed herein have been used as terms of description and not of limitation, and there is no intention in the use of such terms and expressions of excluding any equivalents of the features shown and described or portions thereof, but it is recognized that various modifications are possible within the scope of the invention claimed. Thus, it should be understood that although the present invention has been specifically disclosed by preferred embodiments and optional features, modification and variation of the inventions embodied therein herein disclosed may be resorted to by those skilled in the art, and that such modifications and variations are considered to be within the scope of this invention.

[0090] The invention has been described broadly and generically herein. Each of the narrower species and sub-generic groupings falling within the generic disclosure also form part of the invention. This includes the generic description of the invention with a proviso or negative limitation removing any subject matter from the genus, regardless of whether or not the excised material is specifically recited herein.

[0091] Other embodiments are within the following claims and non-limiting examples. In addition, where features or aspects of the invention are described in terms of Markush groups, those skilled in the art will recognize that the invention is also thereby described in terms of any individual member or subgroup of members of the Markush group.

### EXPERIMENTAL SECTION

[0092] The CRISPR (clustered regularly interspaced short palindromic repeats)-Cas9 system enables ready modification of the mammalian genome and has been used to generate single or multiplexed gene knockouts, introduce specific point mutations, or insert epitope tags. However, there is a lack of generalizable methods to rapidly control the activity of the Cas9 endonuclease.

[0093] Disclosed herein is the development of a Cas9 variant, whose activity can be switched on and off in mammalian cells, for example, human cells, using an inducing agent, for example the chemical tamoxifen. Fusions of the wildtype Cas9 enzyme with the mutated hormone-binding domain of the estrogen receptor (ERT2) were generated. Furthermore, these Cas9 variant were systematically engineered by varying the position of ERT2 relative to Cas9, altering the number of ERT2 copies at the N- or C-terminus of Cas9, and testing different linker lengths and compositions. The optimized Cas9 variant (iCas) shows minimal endonuclease activity in the absence of tamoxifen but exhibits high editing efficiencies at multiple loci when the inducing agent is added. The duration and concentration of the inducing agent, for example tamoxifen, were also tuned so as to eliminate off-target genome modification. Additionally, iCas was utilised to target the Wnt signalling pathway and demonstrated that genome modification and signalling perturbation occurred much more rapidly than an alternative system that relied on a doxycycline-inducible promoter to drive Cas9 expression. The results highlight the utility of iCas for tight spatiotemporal control of genome editing activity.

### Initial Development of a Chemical-Inducible Cas9 Variant

[0094] Different fusions of the ERT2 domain with wildtype Cas9 derived from the bacterium Streptococcus pyogenes (FIG. 1b) were constructed and tested. ERT2 was placed at either the N- or C-terminus of Cas9 and the position of the nuclear localization signal (NLS) was also varied. Using HEK293 cells, the constructs were evaluated for editing activity with and without 1 μM 4-hydroxytamoxifen (4HT) by targeting four distinct genomic loci—a coding exon of the EMX1 gene, an intron of PPP1R12C gene, and two separate sites within the promoter region of the VEGFA gene. As determined using the Surveyor cleavage assay, which provides an estimation of the amount of genome modifications present, it was found that only variant E, an ERT2-Cas9-ERT2 fusion, showed low editing activity in the absence of 4HT, but significantly higher editing when the chemical was present (P<0.05, Student's t-test) across all four targeted loci (FIG. 1c). Illumina deep sequencing technology was also used to quantify the percentage of insertions and deletions (INDELS) generated at the targeted sites by each construct and observed that addition of tamoxifen significantly increased the editing activity of variant E at all the targeted loci (P<0.05, Student's t-test), but did not have a consistent effect on the other variants tested (FIG. 1d). The results were further confirmed by Sanger sequencing of individual clones (FIG. 5). The difference in genome editing activity with and without tamoxifen was not due to a change in overall Cas9 protein levels, but was rather a result of a dramatic change in the amount of Cas9 present in the nucleus (FIG. 6). Taken together, these results indicate that the fusion of ERT2 domains to both the N- and C-terminus of Cas9 rendered the endonuclease activity of Cas9 dependent on tamoxifen by sequestering the enzyme in the cytoplasm in the absence of the inducer; upon addition of tamoxifen, the ERT2-Cas9-ERT2 fusion protein was able to translocate into the nucleus to perform its genome editing function.

### Optimization of the ERT2-Cas9-ERT2 Architecture

[0095] All the initial fusion variants tested showed some background activity without tamoxifen, especially at the EMX1 exonic site and one of the VEGFA promoter sites. Hence, it was sought to develop the conditional genome editing system further. First, the lengths and amino acid compositions of the protein linkers between each ERT2 domain and the Cas9 enzyme were varied. Linker lengths that were tested ranged from 2 to 20 amino acids and the main focus was on the linker composition primarily of six amino acids (A, E, G, P, S, and T), which had previously been reported to be ideal for generating open flexible loops, and therefore polypeptides in stable conformations. Second, since the size of Cas9 is around four times that of Cre (160 kDa versus 40 kDa), it was reasoned that more copies of the ERT2 domain may be required to fully control the cellular localization and subsequent activity of the Cas9 nuclease. Thus, different copy numbers of ERT2 at either the N- or C-terminus of Cas9 were tested. In total, 30 variants with distinct configurations (FIG. 2a and Table 1) were further analysed. The variants were classified into four separate groups based on how they differed from the initial ERT2-Cas9-ERT2 fusion.

[0096] To assay the activities of all the Cas9 variants, a green fluorescent protein (GFP) disruption assay was employed, whereby cleavage and erroneous repair of a constitutively expressed GFP gene in HEK293 cells causes a loss of fluorescence signal which can be detected by flow cytometry (FIG. 7). Two different sgRNAs were used to target non-overlapping regions of the GFP gene. For comparison, the original ERT2-Cas9-ERT2 fusion (variant E) and the wildtype Cas9 enzyme were included, which provided an estimation of the maximum possible reduction in fluorescence signal. It was observed that cells transfected with the wildtype Cas9 enzyme showed a high reduction in GFP intensity regardless of whether 4-hydroxytamoxifen was present or absent (FIG. 2b). In contrast, all the tested variants exhibited an increased reduction of fluorescence signal upon 24 hours of 4-hydroxytamoxifen treatment. It was also observed that most of the variants showed some loss of fluorescence signal, even without the presence of tamoxifen, suggesting activity leakage. The variants that showed the least leakage belonged to Group 3 and Group 4, which contained two copies of ERT2 on the C-terminus of Cas9.

[0097] To confirm the results of the GFP disruption experiments, the T7 endonuclease I Surveyor assay was performed to detect genome modifications (FIG. 2c and FIG. 8b) and also analysed the mutation landscape by Illumina deep sequencing (FIG. 2d, FIG. 8c and FIG. 9) using EMX1 as the test genomic locus. Consistent with the flow cytometry-based studies, it was found that varying the linker length or composition alone generally did not improve the performance of the inducible system. Instead, increasing the copy number of ERT2 domains, particularly on the C-terminus of Cas9, resulted in an overall level of background activity that was not significantly different from the control plasmid that did not express a sgRNA (“no sgRNA”). The fusion of additional ERT2 domains did not inactivate the Cas9 enzyme, as all the tested variants showed an increase in the amount of genome modifications, e.g. insertions and deletions (INDELs), upon 1 μM 4-hydroxytamoxifen treatment, as determined by the Surveyor assay or by deep sequencing.

[0098] Next, all data was examined together to identify the best performing variants. The rank orders of the Cas9 variants in at least two out of the three assays agreed well with one another (P<0.05, Kolmogorov-Smirnov test) (FIG. 10). Notably, 8 out of the 30 Cas9 variants demonstrated a consistently lower level of background activity than the original ERT2-Cas9-ERT2 fusion (variant E) across all experiments (FIG. 11). However, only three of these (variants 27, 29, and 30), all of which were from group 4, showed consistent and robust editing activity upon induction (FIG. 2d). Hence, variants 27, 29, and 30 were pursued further, as these gave a high percentage of genome modifications with 4-hydroxytamoxifen but a low percentage of INDELS without 4-hydroxytamoxifen.

Characterization and Performance of iCas Under Different 4-hydroxytamoxifen Treatment Regimes

[0099] In previous experiments, HEK293 cells had been transfected with the relevant plasmids, incubated for 24 hours, and then treated the cells with 1 μM tamoxifen for another 24 hours. However, as the amount of Cas9 in the cell has to be tightly controlled, it was sought to ascertain the behaviour of the optimized Cas9 variants under various treatment conditions, because insufficient Cas9 will give rise to inefficient cleavage of the target genomic locus, while excess Cas9 may lead to unintended non-specific cleavage of off-target sites. Hence, the aim was to ascertain the behaviour of the optimized Cas9 variants under a range of tamoxifen treatment conditions, which would in turn determine the level of nuclease activity in the cell.

[0100] Three different concentrations of 4-hydroxtamoxifen (10 nM, 100 nM, and 1000 nM) and six durations of chemical treatment (2 hours, 4 hours, 6 hours, 8 hours, 16 hours, 24 hours, and 48 hours) were tested for variants 27, 30, and 29. The amount of genome modification at the EMX1 locus was quantified using the Surveyor assay (FIG. 3a and FIG. 12a). Cleavage activity was detected within 4 hours of 4-hydroxytamoxifen treatment for all the three variants, showing an increasing trend with longer treatment durations, which was further confirmed by deep sequencing (FIG. 12b) and appearing to plateau at around 8 hours. Notably, owing to its higher sensitivity, deep sequencing also revealed a low level of DNA editing after just 2 hours of 4-hydroxytamoxifen treatment. Additionally, it was found that 4-hydroxytamoxifen yielded a significantly lower level of nuclease activity at 10 nM than at 100 nM or 1,000 nM (P<0.005, Wilcoxon rank-sum test) (FIG. 13). Hence, either 100 nM or 1,000 nM of 4-hydroxytamoxifen was used in all subsequent experiments.

[0101] A key performance measure of an inducible system is whether the system exhibits any background activity in the absence of the inducer. Surveyor assay showed a low amount of genome modification at the EMX1 locus for all three variants without 4-hydroxytamoxifen treatment (0 nM). Leaky activity per se was observed only at the last time point (48 hours) for Variant 30 (FIG. 3a; FIG. 12b). From deep sequencing, leaky activity was first detected at 6 hours, 2 hours, and 16 hours for variants 27, 29, and 30, respectively (FIG. 12b) Subsequently, it was tested whether the three variants displayed any leaky activity at six other endogenous genomic loci, namely two sites in the promoter region of the VEGFA gene, two distinct sites in the intron of the WAS gene, one site in an intron of the TAT gene, and one site in the coding region of the FANCF gene. Genomic DNA was isolated 24 hours after transfection without any tamoxifen treatment and analysed using the Surveyor assay (FIG. 3). Consistent with the EMX1 results, a low amount of genome modification was observed at four loci for variant 27 and at two loci for variant 29. No cleavage bands were detected for variant 30 in the absence of the inducer. Additionally, the leakiness in activity observed for variants 27 and 29 became more pronounced over time (FIG. 14).

[0102] At 24 hours after transfection with a FANCF-targeting plasmid, cells were treated with or without tamoxifen for another 24 hours before genomic DNA was isolated and analysed by the Surveyor assay (FIG. 10). Although strong cleavage bands were observed when the cells had been exposed to 100 nM or 1000 nM tamoxifen, respectively, for all the three Cas9 variants, it was also possible to detect an increase in genome modification for variant 27 and variant 29 in the absence of tamoxifen. Again, no cleavage bands were observed for variant 30 without tamoxifen treatment.

[0103] To verify the results from the Surveyor assays and deep sequencing experiments, immunohistochemical staining was performed to determine the subcellular localization of the three variants, all of which contained two copies of ERT2 at both termini of the enzyme ((ERT2)2-Cas9-(ERT2)2), with or without 1 μM 4-HT. 24 hours after transfection with plasmids carrying a Cas9 variant and a sgRNA targeting the EMX1, VEGFA, FANCF, WAS, or TAT genomic locus, the cells were either fixed immediately and stained with anti-V5 or were subjected to 6 h or 24 h 4-HT treatment before fixation and staining (FIG. 15). The percentage of cells that showed a nuclear localization of (ERT2)2-Cas9-(ERT2)2 was quantified (FIG. 3b). For all three Cas9 variants, it was observed that addition of 4-hydroxytamoxifen led to a significant increase in the percentages of cells exhibiting a nuclear localization of (ERT2)2-Cas9-(ERT2)2 (P<0.05, Student's t-test). Most of the protein translocation occurred within the first 6 hours of 4-hydroxytamoxifen treatment. Importantly, in the absence of 4-hydroxytamoxifen, cells that were transfected with variant 30 showed significantly less nuclear localization of (ERT2)2-Cas9-(ERT2)2 than cells that were transfected with variant 27 or variant 29 (P<0.05, Student's t-test). Collectively, these data indicated that variant 30 had less background activity than variants 27 and 29 across multiple loci, thereby suggesting that variant 30 could be used for precise control of genome editing. Hence, all subsequent experiments were performed with variant 30, hereafter referred to as iCas.

[0104] It was sought to test the robustness of iCas by using it to target the VEGFA promoter as well as the WAS, TAT, and FANCF genes for different durations of 1 μM 4-HT treatment (2 hours, 4 hours, 6 hours, 8 hours, 16 hours, and 24 hours). Consistently, the Surveyor assay showed nuclease activity within 4 hours of 4-hydroxytamoxifen treatment for all loci tested (FIG. 3c). The editing activity continued to increase with longer treatment durations. Additionally, iCas showed similarly fast responses to 4-hydroxytamoxifen in different human cell lines (FIG. 16), including the cancer cell lines MCF7, DLD1, and HCT116. These results indicate that iCas is a robust inducible genome-editing system in mammalian cells.

Specificity of iCas at Endogenous Off-Target Sites

[0105] To assess the DNA cleavage specificity of iCas, the modification of known Cas9 off-target sites of the EMX1, VEGFA, FANCF, WAS, and TAT sgRNAs was measured. Twenty-four hours after transfection, HEK293 cells were treated with 1 μM 4-hydroxytamoxifen for different durations (4 hours, 6 hours, 8 hours, 16 hours, and 24 hours) and used the Surveyor assay to assess editing activity at each off-target site (FIG. 3d and FIG. 17). Overall, cleavage at off-target sites tended to emerge later than at the corresponding on-target sites, or it occurred at lower levels, which was further confirmed by deep sequencing (FIG. 18). Nevertheless, the sgRNAs tested could be divided into three groups. In the first group, the sgRNAs were highly specific for their intended target (FIGS. 17a and 18a). For EMX1, the iCas system did not yield any measurable cleavage at the two off-target sites tested, but wild-type Cas9 produced off-target modifications as described previously (FIG. 19). In the second group, the sgRNAs were moderately specific, as exemplified by the TAT sgRNA (FIGS. 17b and 18b). Here, the optimal time window of 4-hydroxytamoxifen treatment for minimizing off-target effects appeared to be around 4 to 8 hours. In the third group, the sgRNAs were unspecific, and genome modifications could be detected at on-target and off-target sites at approximately the same time (FIGS. 17c and 18c). For these sgRNAs, it was not possible to tune the duration of chemical treatment to obtain the desired target genome modification without considerable off-target editing. Collectively, the data showed that limiting Cas9 activity is generally a viable strategy to improve the specificity of the endonuclease at most but not all genomic loci.

Comparison of iCas with a Promoter-Based Approach

[0106] As different methods may be adopted for inducible genome editing, iCas was compared with an alternative strategy whereby the wild-type Cas9 enzyme was expressed under a doxycycline (dox)-inducible promoter (P_{TRE3G}-Cas9). To this end, a previously reported STF3A cell line that carries a Wnt-responsive luciferase reporter and also strongly expresses a Wnt ligand was used, thereby giving high reporter activity. It was reasoned, without being bound by theory, that if β-catenin, a key signal transducer in the Wnt pathway, was inactivated, luciferase expression would be reduced considerably. Thus, it was sought to use iCas or PTRE3G-Cas9 to knock out CTNNB1, which encodes β-catenin, and to determine how rapidly each conditional system could perturb Wnt signalling upon induction. Firstly a gene encoding the Tet-On 3G transactivator, which binds to and activates expression from PTRE3G in the presence of doxycycline, was stably integrated into the STF3A cell line (FIG. 20a) and verified the functionality of the engineered (STF3A-Tet-On) cells (FIG. 20b). Next, iCas or P_{TRE3G}-Cas9 was used to target the second coding exon of CTNNB1 near the ATG start codon. 24 hours after transfection, cells were treated with 1 μM 4-hydroxytamoxifen or 1 μg/ml doxycycline for 6 hours, 12 hours, or 24 hours. The cells were then harvested for analysis using the Surveyor assay. iCas was consistently able to modify the target locus within 6 hours of 4-hydroxytamoxifen treatment, and the INDEL frequency increased with longer exposures to 4-hydroxytamoxifen (FIG. 4a). No cleavage bands were observed in the absence of 4-hydroxytamoxifen at any time point. However, for the P_{TRE3G}-Cas9 system, cleavage bands were only observed after the cells were exposed to doxycycline for 24 hours.

[0107] To demonstrate the impact of genome modification at the CTNNB1 locus, luciferase assays were performed on the STF3ATet-On cell line after transfection with iCas or P_{TRE3G}-Cas9. Cells were treated for 6 hours with the respective chemical and then harvested after another 72 hours to allow sufficient time for changes in β-catenin or luciferase protein levels. It was verified that both the transcript and protein levels of β-catenin were downregulated in cells co-transfected with iCas and an CTNNB1-targeting sgRNA (FIG. 21). Consequently, a significant decrease in luciferase activity was observed in these cells (P<0.001, Student's t-test) (FIG. 4b). In contrast, there was no significant change in β-catenin expression or luciferase activity in cells transfected with an EMX1-targeting sgRNA or P_{TRE3G}-Cas9. Additionally, the expression profiles of known Wnt target genes paralleled the results from the luciferase assays (FIG. 4c and FIG. 22). Collectively, this data highlights the iCas system's advantage in speed over an alternative inducible-promoter approach in temporal control of genome-editing activity.

### Benchmarking Different Post-Translational Control Systems

[0108] Two other chemical-inducible strategies that rely on post-translational control were recently reported, and it was sought to benchmark iCas against these other strategies. The best-performing intein-Cas9 and split-Cas9 constructs from these studies were cloned into the same plasmid backbone as iCas, and all experiments were performed side by side in HEK293 cells to ensure a fair comparison. The iCas and intein-Cas9 systems were induced with 1 μM 4-hydroxytamoxifen and the split-Cas9 system with 200 nM rapamycin, on the basis of published reports. For the comparison, the EMX1, TAT, and WAS genomic loci were targeted with or without the appropriate inducer. Different durations of chemical treatment were tested, and the extent of genome modification was measured by the Surveyor assay (FIG. 5a and FIG. 23a) and by deep sequencing (FIG. 24a). Overall, without the inducer, the split-Cas9 architecture showed the lowest level of background activity, and iCas and intein-Cas9 had comparable levels of leakiness. However, with the inducer, iCas consistently showed higher cleavage efficiency than intein-Cas9 and split-Cas9, at all time points and at all genomic loci. Notably, the amount of INDELs produced by active iCas was 1.6- to 4.8-fold higher than those produced by the reassembled split-Cas9 complex. Hence, without being bound by theory, the lower background observed in split-Cas9 appeared to be a consequence of an overall reduction in editing activity. Next, the switching ratio was calculated, which is defined as the extent of genome modification with the relevant inducer divided by the extent of genome modification without the inducer (FIG. 5b and FIGS. 23b and 24b). Overall, the iCas system and the split-Cas9 architecture produced similar switching ratios. However, in the Surveyor assay, iCas showed significantly higher ratios than intein-Cas9 at the EMX1 and WAS loci (P<0.1, Student's t-test), and in deep sequencing it showed significantly higher switching ratios than intein-Cas9 at all tested loci (P<0.05, Student's t-test). These results suggest that iCas is turned on more efficiently than intein-Cas9 upon addition of 4-hydroxytamoxifen.

[0109] Besides single gene targeting, the ability of iCas to perform multiplex genome engineering was compared with that of intein-Cas9 or split-Cas9. HEK293 cells were co-transfected with a sgRNA targeting EMX1 and another sgRNA targeting a coding exon of ADAR1 (ADAR), and subsequently the extent of genome modification was analysed by the Surveyor assay. After 12 hours of chemical treatment, it was observed that iCas generated INDELs at both the EMX1 and ADAR1 genomic loci (FIG. 5c). In contrast, intein-Cas9 and split-Cas9 did not produce detectable cleavage at any of the targeted locus. Additionally, after 24 hours of chemical treatment, iCas produced more genome modification than at 12 hours, and intein-Cas9 was also able to edit both the EMX1 and ADAR1 loci (FIG. 5d). However, split-Cas9 still did not edit any of the targeted genes. These results were further confirmed with a different pair of sgRNAs (FIG. 40c). Collectively, this data highlights the advantage of iCas over intein-Cas9 and split-Cas9 in performing conditional multiplex genome editing.

Repeated Toggling of iCas Activity

[0110] In principle, a conditional system such as iCas should allow users to generate stable cell lines and induce its activity whenever needed. To demonstrate this, retroviral transduction was used to establish a HEK293 cell line that stably expresses iCas (HEK293-iCas cells). The cell line was verified to be functional (FIG. 25a) and monitored the intracellular localization of iCas by immunofluorescence (FIG. 6a). Without 4-hydroxytamoxifen, most cells produced an iCas protein that was localized in the cytoplasm; only 15% of the cells contained nuclear-localized protein. However, upon 24 hour treatment with 4-hydroxytamoxifen, the proportion of cells with nuclear-localized protein increased significantly, to 48% (P<0.001, Student's t-test). The inducer was then washed away and the cells immunostained with anti-V5 antibody at 48 and 72 hours after removal of 4-hydroxytamoxifen. Quantification of microscopy images showed that by 72 hours, the percentage of cells with nuclear-localized protein had decreased to a level that was not significantly different from that of the pre-induction state (FIG. 6b).

[0111] Subsequently, the possibility of toggling the activity of iCas was explored (FIG. 25b). After 1 μM 4-hydroxytamoxifen treatment of HEK293 cells co-transfected with iCas and a first sgRNA targeting the WAS locus, the inducer was removed and 72 hours waiting time was allowed to pass, thereby allowing nuclear-localized iCas protein to exit the nucleus before introducing a second sgRNA targeting a coding exon of ASXL2. The cells were then either treated with 4-hydroxytamoxifen a second time or left untreated. From the Surveyor assay, cleavage activity was readily observed at both targeted loci for cells that were treated twice with the inducer (FIG. 6c); however, cleavage was detected only at the WAS locus in cells that were exposed to 4-hydroxytamoxifen after the first transfection but not after the second transfection, indicating that iCas was successfully switched off after the first induction event. Hence, these results show that iCas is a reversible genome-editing system.

### Methods

### Cell Culture and Transfection

[0112] All cell lines were cultured in Dulbecco's Modified Eagle Medium (DMEM) supplemented with 10% FBS, 2 mM L-Glutamine and 1% penicillin/streptomycin. Transfection was performed in 12-well plates at around 70% cell confluency using either Turbofect (Thermo Scientific) or Lipofectamine 2000 (Life Technologies), according to manufacturers' instructions. When necessary, cells were treated with varying concentrations of 4-hydroxytamoxifen (Sigma Aldrich).

### PCR and Mutagenesis

[0113] All oligonucleotides for PCR and mutagenesis reactions were purchased from Integrated DNA Technologies (IDT). PCR was performed with MyTaq DNA Polymerase (BioLine), Phusion High-Fidelity DNA Polymerase (New England Biolabs), or Q5 High-Fidelity DNA Polymerase (New England Biolabs). For MyTaq, the following cycling parameters were used: 95° C. for 3 minutes, followed by 35 cycles of (95° C. for 30 seconds, 60° C. for 30 seconds, and 72° C. for 30 seconds), and then 72° C. for 2 minutes. For Phusion and Q5, the following cycling parameters were used: 98° C. for 3 minutes followed by 40 cycles of (98° C. for 15 seconds, 63° C. for 30 seconds, and 72° C. for 30 seconds), and then 72° C. for 2 minutes. Mutagenesis was performed using QuikChange Lightning Site-Directed Mutagenesis kit (Agilent Technologies) according to manufacturer's instructions, in order to incorporate novel restriction sites or DNA linker fragments into the CRISPR-Cas9 variant plasmids. Mutagenic primers were designed using the QuikChange Primer Design Tool (http://www.genomics.agilent.com/primerDesignProgram.jsp).

### Construction of Cas9 Variants

[0114] The GeneArt CRISPR nuclease vector (Life Technologies), which contains a human codon-optimized Streptococcus pyogenes Cas9 enzyme with a V5 epitope tag, was used as the wildtype Cas9 expression plasmid. The ERT2 domain was isolated using PCR from the pCAG-ERT2-Cre-ERT2 plasmid (Addgene #13777) and cloned into the pCR-BluntII-TOPO vector (Life Technologies). Different linkers and restriction sites were added using the QuikChange Lightning kit (Agilent Technologies). Each of the modified ERT2 fragment was flanked with either AgeI and SfoI or EcoRI and XbaI cut sites for cloning into the N- or C-terminus of Cas9 respectively. All Cas9 variants were confirmed by Sanger sequencing.

### GFP Disruption Assay

[0115] HEK293-GFP stable cells were purchased from GenTarget. One day after seeding, cells were transfected using Lipofectamine 2000 (Life Technologies) according to manufacturer's instructions, with efficiency reaching at least about 70% per well. Experimental cells were treated with 1 mM 4-hydroxytamoxifen (Sigma Aldrich), while control cells remained in culture media devoid of tamoxifen. 5 days after transfection, cells were trypsinised and resuspended in PBS containing 2% FBS for analysis by flow cytometry. All the data were normalized to the average fluorescence intensity of cells transfected with a plasmid that did not express any sgRNA.

### Generation of STF3A-TetOn Stable Cells

[0116] STF3A cells were modified to stably express the Tet-On 3G transactivator protein via retroviral transduction and drug selection. Briefly, to generate retroviruses, GP2-293 cells were transfected at around 70% confluence with a transfection mix comprising 20 μg pCMV-VSVG envelope vector, 50 μg pRETROX-TET3G vector (CloneTech), and 140 μl Lipofectamine 2000 (LifeTechnologies) diluted in 3.75 ml Opti-MEM (Life Technologies) and 7.5 ml DMEM containing 10% FBS. The transfection mix was substituted with 10 ml DMEM containing 5% FBS after 6 hours of incubation at 37° C. Retrovirus-containing medium was harvested after 24 hours and purified using Amicon Ultra-15 Centrifugal Filter Units (Merck Millipore). STF3A cells were then infected twice with 20 μl retroviruses each time and subsequently selected in DMEM containing 500 μg/ml G418 over 5 days. To test the expression of the transactivator gene, STF3A-TetOn cells were transfected with 1 μg pTRE-tdTomato vector (Addgene #50798) and observed for red fluorescence 24 hours after treatment with 1 μg/ml doxycycline.

### Luciferase Assay

[0117] STF3A-TetOn cells were transfected with 1 μg iCas or pTRE3G-Cas9 and treated with 1 μM tamoxifen or 1 μg/ml doxycycline respectively for 6 hours. The cells were then trypsinised and re-seeded equally into a Corning 96-well flat clear bottom white plate. Samples were assayed for luciferase activity using Dual-Glo Luciferase (Promega) according to manufacturer's instructions. All measurements were taken using the i-control software for Tecan microplate readers. All firefly luciferase measurements were normalized to the corresponding renilla luciferase readings.

### Surveyor Cleavage Assay

[0118] Genomic DNA was isolated from cells using the DNeasy Blood and Tissue Kit (Qiagen) and the loci-of-interest were amplified using Q5 High-Fidelity DNA Polymerase (New England Biolabs; see Table 3 for list of primers). The PCR products were purified using the GeneJET Gel Extraction Kit (Thermo Scientific). Subsequently, 250 ng DNA was incubated at 95° C. for 5 minutes in 1× NEBuffer 2 and then slowly cooled at a rate of −0.1° C./second. After annealing, 5U T7 endonuclease I (New England Biolabs) was added to each sample and the reactions were incubated at 37° C. for 50 minutes. The T7E1-digested products were separated on a 2.5% agarose gel stained with GelRed (Biotium) and the gel bands were quantified using ImageJ.

### Illumina Deep Sequencing

[0119] Sequencing libraries were constructed via two rounds of PCR. In the first round, the loci-of-interest were amplified from genomic DNA using Q5 High-Fidelity DNA Polymerase (New England Biolabs) and the primers listed in Supplementary Table 4. Each forward primer contains the common sequence GCG TTA TCG AGG TC, while each reverse primer contains the common sequence GTG CTC TTC CGA TCT. In the second round, the PCR products from the first round were barcoded using Phusion High-Fidelity DNA Polymerase (New England Biolabs) and the following primers: Forward—AAT GAT ACG GCG ACC ACC GAG ATC TAC ACC CTA CAC GAG CGT TAT CGA GGT C; Reverse—CAA GCA GAA GAC GGC ATA CGA GAT (barcode) GTG ACT GGA GTT CAG ACG TGT GCT CTT CCG ATC T. 10 bp barcodes designed by Fluidigm for the Access Array System were used. All samples were sequenced on MiSeq (Illumina) to produce paired 151 bp reads.

### Cell Fractionation

[0120] HEK293 cells were fractionated using the Rapid Efficient And Practical (REAP) method. Briefly, the cells were scraped in ice-cold PBS, collected into 1.5 ml Eppendorf tubes, and pop-spun for 10 seconds in a table-top centrifuge. The supernatant was discarded and the pellet was lysed with 0.1% Igepal CA630 (Sigma Aldrich) in PBS supplemented with protease inhibitor (Calbiochem). Whole cell lysates were aliquoted and the remainder was pop-spun for 10 seconds. The supernatant, comprising the cytosolic fraction, was collected into a new tube. The pellet, comprising the nuclear fraction, was resuspended using 0.1% Igepal CA630 in PBS with protease inhibitor. Whole cell lysates and nuclear fractions were subjected to 10 cycles of sonication (each cycle consisted of 30 seconds sonication followed by 30 seconds rest).

### Western Blot Analysis

[0121] Proteins from whole cell lysates, nuclear fractions, and cytosolic fractions were loaded in equal amounts for SDS PAGE and then transferred onto a nitrocellulose membrane for western blot. The primary antibodies used were α-V5 (Life Technologies, 1:8000 dilution), α-3PGDH (Santa Cruz, 1:1000 dilution), and α-total histone H3 (Abcam, 1:10000 dilution). Primary antibodies were diluted in TBST+5% milk and incubated overnight at 4° C. Secondary antibodies were used at a 1:2500 dilution in TBST+5% milk Membranes were exposed after addition of WesternBright Sirius HRP substrate (Advansta).

### Immunohistochemistry

[0122] Paraformaldehyde-fixed HEK293 cells were first incubated with blocking solution (10% FBS in 0.1M PBS) (JR Scientific Inc) for 30 minutes and then quenched with 3% hydrogen peroxide. Next, the samples were incubated for 2 hours at room temperature or 4° C. overnight with primary antibody specific against the V5 epitope tag (Life Technologies) in blocking solution. Negative controls were incubated with blocking solution without any primary antibody. Subsequently, the samples were thoroughly washed with PBS and then incubated for 1 hour at room temperature with secondary horseradish peroxidase (HRP)-conjugated antibody (GE Healthcare UK Ltd). After further incubation with DAB substrate (Vector Laboratories) for 10 minutes at room temperature, the cover slips were washed with distilled water, counter-stained with hematoxylin (Vector Laboratories) for 10 minutes to reveal cellular material, and mounted onto glass slides (Thermo Scientific). All slides were viewed and imaged using a light microscope (Zeiss Axio Imager Z1 with attached Leica Axiocam MRc5 camera) with the appropriate filters.

### Tables

TABLE 1
List of Cas9 variants constructed and tested Amino acids for the
different protein linkers are given in bold letters.

| No. | Details |
|---|---|
| 1 | NLS-TG-ERT2-SGSETPGTSESAGA-Cas9-NLS-ERT2 |
| 2 | NLS-TG-ERT2-SGSEGA-Cas9-NLS-ERT2 |
| 3 | NLS-TG-ERT2-GGSGGSGA-Cas9-NLS-ERT2 |
| 4 | NLS-TG-ERT2-GTSESATPESGGA-Cas9-NLS-ERT2 |
| 5 | NLS-TG-ERT2-SGSETPGTGA-Cas9-NLS-ERI2 |
| 6 | NLS-TG-ERT2-SESATPESGA-Cas9-NLS-ERT2 |
| 7 | NLS-TGGGS-ERT2-SGSETPGTGA-Cas9-NLS-ERT2 |
| 8 | NLS-TGGGS-ERT2-SGSETPGTPGGA-Cas9-NLS-ERT2 |
| 9 | NLS-TG-ERT2-GASGSKTPG-Cas9-NLS-ERT2 |
| 10 | NLS-TG-ERT2-TPESGA-Cas9-NLS-ERT2 |
| 11 | NLS-TGPGGS-ERT2-GA-Cas9-NLS-ERT2 |
| 12 | NLS-TGGGS-ERT2-SGSETPGTSEGA-Cas9-NLS-ERT2 |
| 13 | NLS-TGGGS-ERT2-TPESGA-Cas9-NLS-ERT2 |
| 14 | NLS-TGPGGSAGDTTGPGGS-ERT2-GA-Cas9-NLS-ERT2 |
| 15 | NLS-TGGGS-ERT2-SESATPESGA-Cas9-NLS-ERT2 |
| 16 | NLS-TGGGS-ERT2-SGSEGA-Cas9-NLS-ERT2 |
| 17 | NLS-TG-ERT2-PG-Cas9-NLS-ERT2 |
| 18 | NLS-TG-ERT2-GA-Cas9-NLS-SGS-ERT2 |
| 19 | NLS-TG-ERT2-GA-Cas9-NLS-GGGS-ERT2 |
| 20 | NLS-TG-ERT2-GGSPRGGS-ERT2-TPESGA-Cas9-NLS-ERT2 |
| 21 | NLS-TGGGS-ERT2-GGSPRGGS-ERT2-TPESGA-Cas9-NLS-ERT2 |
| 22 | NLS-TGGGS-ERT2-PRGGS-ERT2-TPESGA-Cas9-NLS-ERT2 |
| 23 | NLS-TG-ERT2-GA-Cas9-NLS-ERT2-PAG-ERT2 |
| 24 | NLS-TG-ERT2-GA-Cas9-NLS-ERT2-PAGGGS-ERT2 |
| 25 | NLS-TG-ERT2-GGSPRGGS-ERT2-TPESGA-Cas9-NLS-ERT2-PAGGGS-ERT2 |
| 26 | NLS-TGGGS-ERT2-GGSPRGGS-ERT2-TPESGA-Cas9-NLS-ERT2-PAGGGS-ERT2 |
| 27 | NLS-TGGGS-ERT2-PRGGS-ERT2-TPESGA-Cas9-NLS-ERT2-PAG-ERT2 |
| 28 | NLS-TGGGS-ERT2-GGSPRGGS-ERT2-TPESGA-Cas9-NLS-ERT2-PAG-ERT2 |
| 29 | NLS-TG-ERT2-GGSPRGGS-ERT2-TPESGA-Cas9-NLS-ERT2-PAG-ERT2 |
| 30 | NLS-TGGGS-ERT2-PRGGS-ERT2-TPESGA-Cas9-NLS-ERT2-PAGGGS-ERT2 |

TABLE 2
Non-specific off-target sites investigated in this study.

| | | | |
|---|---|---|---|
| EMX1 | Chr2:73160982 | On | GAGTCCGAGCAGAAGAAGAAggg |
| | Chr5:45359083 | Off 1 | GAGTTAGAGCAGAAGAAGAAagg |
| | Chr15:44109747 | Off 2 | GAGTCTAAGCAGAAGAAGAAgag |
| VEGFA P1 | Chr6:43737313 | On | GGGTGGGGGGAGTTTGCTCCtgg |
| | Chr15:65637553 | Off 1 | GGATGGAGGGAGTTTGCTCCtgg |
| | Chr17:39796344 | Off 2 | TAGTGGAGGGAGCTTGCTCCtgg |
| | Chr1:99347667 | Off 3 | GGGGAGGGGAAGTTTGCTCCtgg |
| VEGFA P2 | Chr6:43737454 | On | GGTGAGTGAGTGTGTGCGTGtgg |
| | Chr9:16681608 | Off 1 | AGTGAGTGAGTGTGTGTGTGggg |
| | Chr5:89440985 | Off 2 | AGAGAGTGAGTGTGTGCATGagg |
| | Chr5:115434659 | Off 3 | TGTGGGTGAGTGTGTGCGTGagg |
| | Chr22:37662840 | Off 4 | GCTGAGTGAGTGTATGCGTGtgg |
| WAS I1 | ChrX:48544569 | On | TGGATGGAGGAATGAGGAGTtgg |
| | Chr1:30597854 | Off 1 | TGGATGGAGGGATGAGGAGTggg |
| | Chr2:242451414 | Off 2 | GGGATGGAGGGATGAGGAGTggg |
| | Chr18:21810215 | Off 3 | AGGAGGGAGGAATGGGGAGTtgg |
| WAS I2 | ChrX:48544562 | On | CCCATCCATCCAGAGACACAggg |
| | ChrX:90817748 | Off 1 | CTCTTCCACCCAGAGACACAggg |
| TAT | Chr16:71609818 | On | TCCTCCTGAGACTCCATACCtgg |
| | Chr6:12810776 | Off 1 | CCATCCTGAGACTCCATACCtgg |
| FANCF | Chr11:22647354 | On | GGAATCCCTTCTGCAGCACCtgg |
| | Chr18:8707544 | Off 1 | GGAACCCCGTCTGCAGCACCagg |
| | Chr10:43410014 | Off 2 | GGAGTCCCTCCTACAGCACCagg |
| | Chr10:37953183 | Off 3 | GGAGTCCCTCCTACAGCACCagg |
| | Chr17:78923961 | Off 4 | AGAGGCCCCTCTGCAGCACCagg |

TABLE 3
PCR primers used for the Surveyor cleavage assay.

| Primer Name | Primer Sequence |
|---|---|
| EMX1_On_Set1_FOR | GCC CCT AAC CCT ATG TAG CC |
| EMX1_On_Set1_REV | GGA GAT TGG AGA CAC GGA GA |
| EMX1_On_Set2_FOR | CTG TGT CCT CTT CCT GCC CT |
| EMX1_On_Set2_REV | CTC TCC GAG GAG AAG GCC AA |
| EMX1_Off1_FOR | TTG AGA CAT GGG GAT AGA ATC A |
| EMX1_Off1_REV | CAG GAA TAG CCC TAC AAA GGT G |
| EMX1_Off2_FOR | GTT CTG TAA ACG CCG TAG CC |
| EMX1_Off2_REV | GGA TGC AGT CTG CCT TTT TG |
| PPP1R12C_On_Set1_FOR | GTC TAA CCC CCA CCT CCT GT |
| PPP1R12C_On_Set1_REV | ACA CCT AGG ACG CAC CAT TC |
| PPP1R12C_On_Set2_FOR | CGG TTA ATG TGG CTC TGG TT |
| PPP1R12C_On_Set2_REV | CGC ACG GAG GAA CAA TAT AAA |
| VEGFA_Promoter1_On_Set1_FOR | CTG GAC ACT TCC CAA AGG AC |
| VEGFA_Promoter1_On_Set1_REV | AGG GAG CAG GAA AGT GAG GT |
| VEGFA_Promoter1_On_Set2_FOR | TCA CTG ACT AAC CCC GGA AC |
| VEGFA_Promoter1_On_Set2_REV | CTG AGA GCC GTT CCC TCT TT |
| VEGFA_Promoter1_Off1_FOR | GGG CTA GAG TGT AGT GGC ACA |
| VEGFA_Promoter1_Off1_REV | GCC CTG TTT TCA TCC TAC ACA |
| VEGFA_Promoter1_Off2_FOR | AAG TTG GGC AAG AGT CCA GA |
| VEGFA_Promoter1_Off2_REV | ACC AGC AGA GGA AGG GCT AT |
| VEGFA_Promoter1_Off3_FOR | TGC CAT TTT TAA GCC ATC AG |
| VEGFA_Promoter1_Off3_REV | AGC CCA TTC TTT TTG CAG TG |
| VEGFA_Promoter2_On_FOR | CCA GAT GGC ACA TTG TCA GA |
| VEGFA_Promoter2_On_REV | CCA AGG TTC ACA GCC TGA AA |
| VEGFA_Promoter2_Off1_FOR | GCC GTC TGT TAG AGG GAC AA |
| VEGFA_Promoter2_Off1_REV | GTC TTC CCC CAA CCT CCA GT |
| VEGFA_Promoter2_Off2_FOR | GGC CCA ATC TTA GTG TTT CAG A |
| VEGFA_Promoter2_Off2_REV | TGG TTA AAA GCA AAG GAT GTG A |
| VEGFA_Promoter2_Off3_FOR | CCC TCG CTA GAT ACT GAG GAA A |
| VEGFA_Promoter2_Off3_REV | TGG CCA AGA TAA GGA AAC AAC |
| VEGFA_Promoter2_Off4_FOR | TGA TTC CGC TGA CAC GTA AC |
| VEGFA_Promoter2_Off4_REV | TTC AGA GCC TCT CAC CAC CT |
| WAS_Intron1-2_On_Set1_FOR | CAG CCA ATG AAG GTG AGT CC |
| WAS_Intron1-2_On_Set1_REV | GTG GAT CCC ACA AAC CAT TC |
| WAS_Intron1-2_On_Set2_FOR | AGG AAT CAG AGG CAA AGT GG |
| WAS_Intron1-2_On_Set2_REV | TCC CAT CAA TTC ATC CCT CT |
| WAS_Intron1_Off1_FOR | CTG TCC TCT CTG CAG GAA CC |
| WAS_Intron1_Off1_REV | GTC TGG ATC CCT GCA TCA CT |
| WAS_Intron1_Off2_FOR | CGA GGT TCC AGA ATG CTC TT |
| WAS_Intron1_Off2_REV | GGG AGG CTA AAC CCT GAA AC |
| WAS_Intron1_Off3_FOR | TCT TCA ATG TTC CCC CAC AT |
| WAS_Intron1_Off3_REV | AGG CTG CCA TTG TCT GAA GT |
| WAS_Intron2_Off1_Set1_FOR | TCT CAG AGA TAC AAG GGA AAT CG |
| WAS_Intron2_Off1_Set1_REV | CCA GCA GAC TCT GGG TCT ATT TA |
| WAS_Intron2_Off1_Set2_FOR | TAC AAG GGA AAT CGT GAG ACC |
| WAS_Intron2_Off1_Set2_REV | AGT CAG CAT GCA GAT TCT GGT |
| TAT_On_FOR | GAC AAC ATG AAG GTG AAA CCA A |
| TAT_On_REV | GTC AAA GAA AGC CAG GAA AGA A |
| TAT_Off1_FOR | TGT GGT TGG TTG GTT TGT TG |
| TAT_Off1_REV | GTG ACC AAG CAG GCT CTT TC |
| FANCF_On_FOR | ACC TCT TTG TGT GGC GAA AG |
| FANCF_On_REV | CCA GGC TCT CTT GGA GTG TC |
| FANCF_Off1_FOR | CAG ACT TCA CCA CCA TGC AC |
| FANCF_Off1_REV | GGC CAG TCC TTT GTA AGC AT |
| FANCF_Off2_FOR | AAT GTA AGA GGC AAC CAA AGG A |
| FANCF_Off2_REV | GTT AAT GGA AGG TGA AGG CAG T |
| FANCF_Off3_FOR | AAT GCA AGA GGC AAA CAA AAA |
| FANCF_Off3_REV | CCA ACA TCT TCA CAA GGG TTC |
| FANCF_Off4_FOR | CAA CCT TCA TCC TTG GCT TG |
| FANCF_Off4_REV | GAG ACA GAG CCA TGC AAC CTA |
| CTNNB_1_On_FOR | GCC ACC AGC AGG AAT CTA GT |
| CTNNB_1_On_REV | TCA AAA CTG CAT TCT GAC TTT CA |
| ADAR1_On_FOR | GGG CAG GAA CCT GTC ATA AA |
| ADAR1_On_REV | CCC TTG TTC AGC CAA GAT TC |
| TCF7_On_FOR | TTC CTT CCC AAG TCA GGA ACT |
| TCF7_On_REV | TAT GGG AGA AAA GAC CAG CAC |
| PARP4_On_FOR | GGA CTT CCA GCT TTT TGC AC |
| PARP4_On_REV | TTG CTC TCG GGA TTT TAG GA |
| ASXL2_On_FOR | CAT GGC AGC CCC TTT CTA T |
| ASXL2_On_REV | GCC TGG CCA TAA GTC ATT TT |

TABLE 4
PCR primers used for making Illumina sequencing libraries.

| Primer Name | Primer Sequence |
|---|---|
| EMX1_On_Adapter_FOR | GCG TTA TCG AGG TCG GGC CTC CTG |
| | AGT TTC TCA T |
| EMX1_On_Adapter_REV | GTG CTC TTC CGA TCT GTG GTT GCC |
| | CAC CCT AGT C |
| EMX1_Off1_Adapter_FOR | GCG TTA TCG AGG TCT GCA CAT GTA |
| | TGT ACA GGA GTC AT |
| EMX1_Off1_Adapter_REV | GTG CTC TTC CGA TCT CAC CTT TTA |
| | AGA TCT GAC AGA GAA A |
| EMX1_Off2_Adapter_FOR | GCG TTA TCG AGG TCT GGG CGA GAA |
| | AGG TAA CTT ATG |
| EMX1_Off2_Adapter_REV | GTG CTC TTC CGA TCT ACT GTT TCA |
| | CTG CCT ACC TTC C |
| PPP1R12C_On_Adapter_Set1_FOR | GCG TTA TCG AGG TCG ATC AGT GAA |
| | ACG CAC CAG A |
| PPP1R12C_On_Adapter_Set1_REV | GTG CTC TTC CGA TCT GTC TAA CCC |
| | CCA CCT CCT GT |
| PPP1R12C_On_Adapter_Set2_FOR | GCG TTA TCG AGG TCG TCA GAG CAG |
| | CTC AGG TTC TG |
| PPP1R12C_On_Adapter_Set2_REV | GTG CTC TTC CGA TCT TAG GCC TCC |
| | TCC TTC CTA GTC T |
| VEGFA_Promoter1_On_Adapter_FOR | GCG TTA TCG AGG TCG CAC ATT GTC |
| | AGA GGG ACA C |
| VEGFA_Promoter1_On_Adapter_REV | GTG CTC TTC CGA TCT CAC ACG TCC |
| | TCA CTC TCG AA |
| VEGFA_Promoter1_Off1_Adapter_FOR | GCG TTA TCG AGG TCT CTC AAA CTC |
| | CTG GGC TCA A |
| VEGFA_Promoter1_Off1_Adapter_REV | GTG CTC TTC CGA TCT CTG GTT TTT |
| | GGT TTG GGA AA |
| VEGFA_Promoter1_Off2_Adapter_FOR | GCG TTA TCG AGG TCC CCT CTC CAT |
| | GAA ACT TTG C |
| VEGFA_Promoter1_Off2_Adapter_REV | GTG CTC TTC CGA TCT AGG GCA AAA |
| | CAG GAG AAC AG |
| VEGFA_Promoter1_Off3_Adapter_FOR | GCG TTA TCG AGG TCG CAT CTC TGC |
| | CTT CAT TGC T |
| VEGFA_Promoter1_Off3_Adapter_REV | GTG CTC TTC CGA TCT GCC TAC TCC |
| | AGG GTT TCT CA |
| VEGFA_Promoter2_On_Adapter_FOR | GCG TTA TCG AGG TCG CAG ACG GCA |
| | GTC ACT AGG |
| VEGFA_Promoter2_On_Adapter_REV | GTG CTC TTC CGA TCT CCG TTC CCT |
| | CTT TGC TAG G |
| VEGFA_Promoter2_Off1_Adapter_FOR | GCG TTA TCG AGG TCG ATC CGG TGC |
| | TGC AGT GA |
| VEGFA_Promoter2_Off1_Adapter_REV | GTG CTC TTC CGA TCT GCT CTC CAC |
| | CTC GAT GTC A |
| VEGFA_Promoter2_Off2_Adapter_FOR | GCG TTA TCG AGG TCT CAA AGT TTC |
| | ACA TGG TTG C |
| VEGFA_Promoter2_Off2_Adapter_REV | GTG CTC TTC CGA TCT GTG TGG AGG |
| | GTG GGA CCT |
| VEGFA_Promoter2_Off3_Adapter_FOR | GCG TTA TCG AGG TCA TTA TGC GTA |
| | TTC AGG GTG TGC |
| VEGFA_Promoter2_Off3_Adapter_REV | GTG CTC TTC CGA TCT GCT GGT CAG |
| | AGG GTA CAA CTT TT |
| VEGFA_Promoter2_Off4_Adapter_FOR | GCG TTA TCG AGG TCG GTT AGG AGA |
| | GCT GGC TTG GA |
| VEGFA_Promoter2_Off4_Adapter_REV | GTG CTC TTC CGA TCT CTG GCC TCG |
| | GCC TCT CA |
| WAS_Intron1-2_On_Adapter_FOR | GCG TTA TCG AGG TCG GCA GGG CTG |
| | TGA TAA CTC T |
| WAS_Intron1-2_On_Adapter_REV | GTG CTC TTC CGA TCT ATC TAC CGC |
| | CAA TCC ATC C |
| WAS_Intron1_Off1_Adapter_FOR | GCG TTA TCG AGG TCA CGG CAT GGA |
| | ATT ATT TGG TT |
| WAS_Intron1_Off1_Adapter_REV | GTG CTC TTC CGA TCT GCC TGG GAG |
| | AGA AAT CAA CTC |
| WAS_Intron1_Off2_Adapter_FOR | GCG TTA TCG AGG TCA CTG TGT AGG |
| | AAG CCC ACT CTC |
| WAS_Intron1_Off2_Adapter_REV | GTG CTC TTC CGA TCT AAA GCT TGG |
| | TGA CAG TGA AAT G |
| WAS_Intron1_Off3_Adapter_FOR | GCG TTA TCG AGG TCC ATG AAG GGA |
| | AGA GGT GCA T |
| WAS_Intron1_Off3_Adapter_REV | GTG CTC TTC CGA TCT CCA ACG TGA |
| | CCC TTT TTG AG |
| WAS_Intron2_Off1_Adapter_FOR | GCG TTA TCG AGG TCT CAC AGT CTC |
| | TTC CCC TGC T |
| WAS_Intron2_Off1_Adapter_REV | GTG CTC TTC CGA TCT CTT GGC CAG |
| | TGT CTT TCC AT |
| TAT_On_Adapter_FOR | GCG TTA TCG AGG TCT GTG TTT GGA |
| | AAC CTG CCT A |
| TAT_On_Adapter_REV | GTG CTC TTC CGA TCT CCA AAT CCA |
| | AAG GAC CAT GT |
| TAT_Off1_Adapter_FOR | GCG TTA TCG AGG TCC ATC CCC TGG |
| | CAT CTA GAA A |
| TAT_Off1_Adapter_REV | GTG CTC TTC CGA TCT TCA CTA CCT |
| | GGT GGC TAT GG |
| FANCF_On_Adapter_FOR | GCG TTA TCG AGG TCA GCA TTG CAG |
| | AGA GGC GTA T |
| FANCF_On_Adapter_REV | GTG CTC TTC CGA TCT ATG GAT GTG |
| | GCG CAG GTA G |
| FANCF_Off1_Adapter_FOR | GCG TTA TCG AGG TCC ACA GAT TGA |
| | TGC CAC TGG A |
| FANCF_Off1_Adapter_REV | GTG CTC TTC CGA TCT ACG CCA GCA |
| | CTT TCT AAG GA |
| FANCF_Off2-3_Adapter_FOR | GCG TTA TCG AGG TCT TAC CAG ATG |
| | GAG GAC AGT GA |
| FANCF_Off2-3_Adapter_REV | GTG CTC TTC CGA TCT ACC AGT TTG |
| | AGA CCT CTG ACC |
| FANCF_Off4_Adapter_FOR | GCG TTA TCG AGG TCG GCT CTG GGT |
| | ACA GTT CTG C |
| FANCF_Off4_Adapter_REV | GTG CTC TTC CGA TCT GCC ACA GAC |
| | GAA GAC ACA GA |

TABLE 1
List of #Cas9 variants constructed and tested. Amino acids for the
different protein linkers are given in bold.

| SEQ | | |
|---|---|---|
| ID No. | No. | Details |
| 15 | 17 | NLS-PR-ERT2-PG-Cas9-ERT2 |
| 16 | 2 | NLS-TG-ERT2-SGSEGA-Cas9-ERT2 |
| 17 | 9 | NLS-TG-ERT2-GASGSKTPG-Cas9-ERT2 |
| 18 | 1 | NLS-TG-ERT2-SGSETPGTSESAGA-Cas9-ERT2 |
| 19 | 5 | NLS-TG-ERT2-SGSETPGTGPGGA-Cas9-ERT2 |
| 20 | 6 | NLS-TG-ERT2-SESATPESGA-Cas9-ERT2 |
| 21 | 4 | NLS-TG-ERT2-GTSESATPESGGA-Cas9-ERT2 |
| 22 | 3 | NLS-TG-ERT2-GGSGGSGA-Cas9-ERT2 |
| 23 | 11 | NLS-TGPGPGGS-ERT2-GA-Cas9-ERT2 |
| 24 | 14 | NLS-TGPGPGGSAGDTTGPGTGPG-ERT2-GA-Cas9-ERT2 |
| 25 | 19 | NLS-TG-ERT2-GA-Cas9-GGGS-ERT2 |
| 26 | 13 | NLS-TGGGS-ERT2-TPESGA-Cas9-ERT2 |
| 27 | 15 | NLS-TGGGS-ERT2-SESATPESGA-Cas9-ERT2 |
| 28 | 16 | NLS-TGGGS-ERT2-SGSEGA-Cas9-ERT2 |
| 29 | 7 | NLS-TGGGS-ERT2-SGSETPGTGA-Cas9-ERT2 |
| 30 | 12 | NLS-TGGGS-ERT2-SGSETPGTSEGA-Cas9-ERT2 |
| 31 | 22 | NLS-TGGGS-ERT2-PRGGS-ERT2-TPESGA-Cas9-ERT2 |
| 32 | 21 | NLS-TGGGS-ERT2-GGSPRGGS-ERT2-TPESGA-Cas9-ERT2 |
| 33 | 23 | NLS-TG-ERT2-GA-Cas9-ERT2-PAG-ERT2 |
| 34 | 24 | NLS-TG-ERT2-GA-Cas9-ERT2-PAGGGS-ERT2 |
| 35 | 8 | NLS-TGGGS-ERT2-SGSETPGTPGGA-Cas9-ERT2 |
| 36 | 27 | NLS-TGGGS-ERT2-PRGGS-ERT2-TPESGA-Cas9-ERT2-PAG-ERT2 |
| 37 | 30 | NLS-TGGGS-ERT2-PR-ERT2-TPESGA-Cas9-ERT2-PAGGGS-ERT2 |
| 38 | 25 | NLS-TG-ERT2-GGSPRGGS-ERT2-TPESGA-Cas9-ERT2-PAGGGS-ERT2 |
| 39 | 28 | NLS-TGGGS-ERT2-TPGGPRGGS-ERT2-TPESGA-Cas9-ERT2-PAG-ERT2 |

The application's sequence listing, which the Patent Office published only in electronic form, follows.

SEQUENCE LISTING (369 sequences)

SEQ ID NO: 1 - protein, 1367 aa, Artificial sequence
  SpCas9
DKKYSIGLDIGTNSVGWAVITDEYKVPSKKFKVLGNTDRHSIKKNLIGALLFDSGETAEATRLKRTARRRYTRRKNRICYLQEIFSNEMAKVDDSFFHRLEESFLVEEDKKHERHPIFGNIVDEVAYHEKYPTIYHLRKKLVDSTDKADLRLIYLALAHMIKFRGHFLIEGDLNPDNSDVDKLFIQLVQTYNQLFEENPINASGVDAKAILSARLSKSRRLENLIAQLPGEKKNGLFGNLIALSLGLTPNFKSNFDLAEDAKLQLSKDTYDDDLDNLLAQIGDQYADLFLAAKNLSDAILLSDILRVNTEITKAPLSASMIKRYDEHHQDLTLLKALVRQQLPEKYKEIFFDQSKNGYAGYIDGGASQEEFYKFIKPILEKMDGTEELLVKLNREDLLRKQRTFDNGSIPHQIHLGELHAILRRQEDFYPFLKDNREKIEKILTFRIPYYVGPLARGNSRFAWMTRKSEETITPWNFEEVVDKGASAQSFIERMTNFDKNLPNEKVLPKHSLLYEYFTVYNELTKVKYVTEGMRKPAFLSGEQKKAIVDLLFKTNRKVTVKQLKEDYFKKIECFDSVEISGVEDRFNASLGTYHDLLKIIKDKDFLDNEENEDILEDIVLTLTLFEDREMIEERLKTYAHLFDDKVMKQLKRRRYTGWGRLSRKLINGIRDKQSGKTILDFLKSDGFANRNFMQLIHDDSLTFKEDIQKAQVSGQGDSLHEHIANLAGSPAIKKGILQTVKVVDELVKVMGRHKPENIVIEMARENQTTQKGQKNSRERMKRIEEGIKELGSQILKEHPVENTQLQNEKLYLYYLQNGRDMYVDQELDINRLSDYDVDHIVPQSFLKDDSIDNKVLTRSDKNRGKSDNVPSEEVVKKMKNYWRQLLNAKLITQRKFDNLTKAERGGLSELDKAGFIKRQLVETRQITKHVAQILDSRMNTKYDENDKLIREVKVITLKSKLVSDFRKDFQFYKVREINNYHHAHDAYLNAVVGTALIKKYPKLESEFVYGDYKVYDVRKMIAKSEQEIGKATAKYFFYSNIMNFFKTEITLANGEIRKRPLIETNGETGEIVWDKGRDFATVRKVLSMPQVNIVKKTEVQTGGFSKESILPKRNSDKLIARKKDWDPKKYGGFDSPTVAYSVLVVAKVEKGKSKKLKSVKELLGITIMERSSFEKNPIDFLEAKGYKEVKKDLIIKLPKYSLFELENGRKRMLASAGELQKGNELALPSKYVNFLYLASHYEKLKGSPEDNEQKQLFVEQHKHYLDEIIEQISEFSKRVILADANLDKVLSAYNKHRDKPIREQAENIIHLFTLTNLGAPAAFKYFDTTIDRKRYTSTKEVLDATLIHQSITGLYETRIDLSQLGGD

SEQ ID NO: 2 - protein, 1307 aa, Artificial sequence
  AsCpf1
MTQFEGFTNLYQVSKTLRFELIPQGKTLKHIQEQGFIEEDKARNDHYKELKPIIDRIYKTYADQCLQLVQLDWENLSAAIDSYRKEKTEETRNALIEEQATYRNAIHDYFIGRTDNLTDAINKRHAEIYKGLFKAELFNGKVLKQLGTVTTTEHENALLRSFDKFTTYFSGFYENRKNVFSAEDISTAIPHRIVQDNFPKFKENCHIFTRLITAVPSLREHFENVKKAIGIFVSTSIEEVFSFPFYNQLLTQTQIDLYNQLLGGISREAGTEKIKGLNEVLNLAIQKNDETAHIIASLPHRFIPLFKQILSDRNTLSFILEEFKSDEEVIQSFCKYKTLLRNENVLETAEALFNELNSIDLTHIFISHKKLETISSALCDHWDTLRNALYERRISELTGKITKSAKEKVQRSLKHEDINLQEIISAAGKELSEAFKQKTSEILSHAHAALDQPLPTTLKKQEEKEILKSQLDSLLGLYHLLDWFAVDESNEVDPEFSARLTGIKLEMEPSLSFYNKARNYATKKPYSVEKFKLNFQMPTLASGWDVNKEKNNGAILFVKNGLYYLGIMPKQKGRYKALSFEPTEKTSEGFDKMYYDYFPDAAKMIPKCSTQLKAVTAHFQTHTTPILLSNNFIEPLEITKEIYDLNNPEKEPKKFQTAYAKKTGDQKGYREALCKWIDFTRDFLSKYTKTTSIDLSSLRPSSQYKDLGEYYAELNPLLYHISFQRIAEKEIMDAVETGKLYLFQIYNKDFAKGHHGKPNLHTLYWTGLFSPENLAKTSIKLNGQAELFYRPKSRMKRMAHRLGEKMLNKKLKDQKTPIPDTLYQELYDYVNHRLSHDLSDEARALLPNVITKEVSHEIIKDRRFTSDKFFFHVPITLNYQAANSPSKFNQRVNAYLKEHPETPIIGIDRGERNLIYITVIDSTGKILEQRSLNTIQQFDYQKKLDNREKERVAARQAWSVVGTIKDLKQGYLSQVIHEIVDLMIHYQAVVVLENLNFGFKSKRTGIAEKAVYQQFEKMLIDKLNCLVLKDYPAEKVGGVLNPYQLTDQFTSFAKMGTQSGFLFYVPAPYTSKIDPLTGFVDPFVWKTIKNHESRKHFLEGFDFLHYDVKTGDFILHFKMNRNLSFQRGLPGFMPAWDIVFEKNETQFDAKGTPFIAGKRIVPVIENHRFTGRYRDLYPANELIALLEEKGIVFRDGSNILPKLLENDDSHAIDTMVALIRSVLQMRNSNAATGEDYINSPVRDLNGVCFDSRFQNPEWPMDADANGAYHIALKGQLLLNHLKESKDLKLQNGISNQDWLAYIQELRN

SEQ ID NO: 3 - protein, 1228 aa, Artificial sequence
  LbCpf1
MSKLEKFTNCYSLSKTLRFKAIPVGKTQENIDNKRLLVEDEKRAEDYKGVKKLLDRYYLSFINDVLHSIKLKNLNNYISLFRKKTRTEKENKELENLEINLRKEIAKAFKGNEGYKSLFKKDIIETILPEFLDDKDEIALVNSFNGFTTAFTGFFDNRENMFSEEAKSTSIAFRCINENLTRYISNMDIFEKVDAIFDKHEVQEIKEKILNSDYDVEDFFEGEFFNFVLTQEGIDVYNAIIGGFVTESGEKIKGLNEYINLYNQKTKQKLPKFKPLYKQVLSDRESLSFYGEGYTSDEEVLEVFRNTLNKNSEIFSSIKKLEKLFKNFDEYSSAGIFVKNGPAISTISKDIFGEWNVIRDKWNAEYDDIHLKKKAVVTEKYEDDRRKSFKKIGSFSLEQLQEYADADLSVVEKLKEIIIQKVDEIYKVYGSSEKLFDADFVLEKSLKKNDAVVAIMKDLLDSVKSFENYIKAFFGEGKETNRDESFYGDFVLAYDILLKVDHIYDAIRNYVTQKPYSKDKFKLYFQNPQFMGGWDKDKETDYRATILRYGSKYYLAIMDKKYAKCLQKIDKDDVNGNYEKINYKLLPGPNKMLPKVFFSKKWMAYYNPSEDIQKIYKNGTFKKGDMFNLNDCHKLIDFFKDSISRYPKWSNAYDFNFSETEKYKDIAGFYREVEEQGYKVSFESASKKEVDKLVEEGKLYMFQIYNKDFSDKSHGTPNLHTMYFKLLFDENNHGQIRLSGGAELFMRRASLKKEELVVHPANSPIANKNPDNPKKTTTLSYDVYKDKRFSEDQYELHIPIAINKCPKNIFKINTEVRVLLKHDDNPYVIGIDRGERNLLYIVVVDGKGNIVEQYSLNEIINNFNGIRIKTDYHSLLDKKEKERFEARQNWTSIENIKELKAGYISQVVHKICELVEKYDAVIALEDLNSGFKNSRVKVEKQVYQKFEKMLIDKLNYMVDKKSNPCATGGALKGYQITNKFESFKSMSTQNGFIFYIPAWLTSKIDPSTGFVNLLKTKYTSIADSKKFISSFDRIMYVPEEDLFEFALDYKNFSRTDADYIKKWKLYSYGNRIRIFRNPKKNNVFDWEEVCLTSAYKELFNKYGINYQQGDIRALLCEQSDKAFYSSFMALMSLMLQMRNSITGRTDVDFLISPVKNSDGIFYDSRNYEAQENAILPKNADANGAYNIARKVLWAIGQFKKAEDEKLDKVKIAISNKEWLEYAQTSVKH

SEQ ID NO: 4 - protein, 313 aa, Artificial sequence
  ERT2
AGDMRAANLWPSPLMIKRSKKNSLALSLTADQMVSALLDAEPPILYSEYDPTRPFSEASMMGLLTNLADRELVHMINWAKRVPGFVDLTLHDQVHLLECAWLEILMIGLVWRSMEHPVKLLFAPNLLLDRNQGKCVEGMVEIFDMLLATSSRFRMMNLQGEEFVCLKSIILLNSGVYTFLSSTLKSLEEKDHIHRVLDKITDTLIHLMAKAGLTLQQQHQRLAQLLLILSHIRHMSNKGMEHLYSMKCKNVVPLYDLLLEAADAHRLHAPTSRGGASVEETDQSHLATAGSTSSHSLQKYYITGEAEGFPATA

SEQ ID NO: 5 - protein, 16 aa, Artificial sequence
  NLS
APKKKRKVGIHGVPAA

SEQ ID NO: 6 - protein, 11 aa, Artificial sequence
  NLS
SRADPKKKRKV

SEQ ID NO: 7 - protein, 48 aa, Artificial sequence
  MLS
LGFVGRVAAAPASGALRRLTPSASLPPAQLLLRAAPTAVHPVRDYAAQ

SEQ ID NO: 8 - protein, 29 aa, Artificial sequence
  MLS
LSRAVCGTSRQLAPVLGYLGSRQKHSLPD

SEQ ID NO: 9 - protein, 28 aa, Artificial sequence
  MLS
SVLTPLLLRGLTGSARRLPVPRAKIHSL

SEQ ID NO: 10 - protein, 31 aa, Artificial sequence
  MLS
LFNLRILLNNAAFRNGHNFMVRNFRCGQPLQ

SEQ ID NO: 11 - protein, 41 aa, Artificial sequence
  MLS
AFLRSMWGVLSALGRSGAELCTGCGSRLRSPFSFVYLPRWF

SEQ ID NO: 12 - protein, 14 aa, Artificial sequence
  V5
GKPIPNPLLGLDST

SEQ ID NO: 13 - protein, 23 aa, Artificial sequence
  2A
SRGSGEGRGSLLTCGDVEENPGP

SEQ ID NO: 14 - protein, 225 aa, Artificial sequence
  OFP
MNLSKNVSVSVYMKGNVNNHEFEYDGEGGGDPYTGKYSMKMTLRGQNSLPFSYDIITTAFQYGFRVFTKYPEGIVDYFKDSLPDAFQWNRRIVFEDGGVLNMSSDITYKDNVLHGDVKAEGVNFPPNGPVMKNEIVMEEPTEETFTPKNGVLVGFCPKAYLLKDGSYYYGNMTTFYRSKKSGQAPPGYHFVKHRLVKTNVGHGFKTVEQTEYATAHVSDLPKFEA

SEQ ID NO: 15 - protein, 2013 aa, Artificial sequence
  Cas9 variant 17 linkers
APKKKRKVGIHGVPAAPRAGDMRAANLWPSPLMIKRSKKNSLALSLTADQMVSALLDAEPPILYSEYDPTRPFSEASMMGLLTNLADRELVHMINWAKRVPGFVDLTLHDQVHLLECAWLEILMIGLVWRSMEHPVKLLFAPNLLLDRNQGKCVEGMVEIFDMLLATSSRFRMMNLQGEEFVCLKSIILLNSGVYTFLSSTLKSLEEKDHIHRVLDKITDTLIHLMAKAGLTLQQQHQRLAQLLLILSHIRHMSNKGMEHLYSMKCKNVVPLYDLLLEAADAHRLHAPTSRGGASVEETDQSHLATAGSTSSHSLQKYYITGEAEGFPATAPGDKKYSIGLDIGTNSVGWAVITDEYKVPSKKFKVLGNTDRHSIKKNLIGALLFDSGETAEATRLKRTARRRYTRRKNRICYLQEIFSNEMAKVDDSFFHRLEESFLVEEDKKHERHPIFGNIVDEVAYHEKYPTIYHLRKKLVDSTDKADLRLIYLALAHMIKFRGHFLIEGDLNPDNSDVDKLFIQLVQTYNQLFEENPINASGVDAKAILSARLSKSRRLENLIAQLPGEKKNGLFGNLIALSLGLTPNFKSNFDLAEDAKLQLSKDTYDDDLDNLLAQIGDQYADLFLAAKNLSDAILLSDILRVNTEITKAPLSASMIKRYDEHHQDLTLLKALVRQQLPEKYKEIFFDQSKNGYAGYIDGGASQEEFYKFIKPILEKMDGTEELLVKLNREDLLRKQRTFDNGSIPHQIHLGELHAILRRQEDFYPFLKDNREKIEKILTFRIPYYVGPLARGNSRFAWMTRKSEETITPWNFEEVVDKGASAQSFIERMTNFDKNLPNEKVLPKHSLLYEYFTVYNELTKVKYVTEGMRKPAFLSGEQKKAIVDLLFKTNRKVTVKQLKEDYFKKIECFDSVEISGVEDRFNASLGTYHDLLKIIKDKDFLDNEENEDILEDIVLTLTLFEDREMIEERLKTYAHLFDDKVMKQLKRRRYTGWGRLSRKLINGIRDKQSGKTILDFLKSDGFANRNFMQLIHDDSLTFKEDIQKAQVSGQGDSLHEHIANLAGSPAIKKGILQTVKVVDELVKVMGRHKPENIVIEMARENQTTQKGQKNSRERMKRIEEGIKELGSQILKEHPVENTQLQNEKLYLYYLQNGRDMYVDQELDINRLSDYDVDHIVPQSFLKDDSIDNKVLTRSDKNRGKSDNVPSEEVVKKMKNYWRQLLNAKLITQRKFDNLTKAERGGLSELDKAGFIKRQLVETRQITKHVAQILDSRMNTKYDENDKLIREVKVITLKSKLVSDFRKDFQFYKVREINNYHHAHDAYLNAVVGTALIKKYPKLESEFVYGDYKVYDVRKMIAKSEQEIGKATAKYFFYSNIMNFFKTEITLANGEIRKRPLIETNGETGEIVWDKGRDFATVRKVLSMPQVNIVKKTEVQTGGFSKESILPKRNSDKLIARKKDWDPKKYGGFDSPTVAYSVLVVAKVEKGKSKKLKSVKELLGITIMERSSFEKNPIDFLEAKGYKEVKKDLIIKLPKYSLFELENGRKRMLASAGELQKGNELALPSKYVNFLYLASHYEKLKGSPEDNEQKQLFVEQHKHYLDEIIEQISEFSKRVILADANLDKVLSAYNKHRDKPIREQAENIIHLFTLTNLGAPAAFKYFDTTIDRKRYTSTKEVLDATLIHQSITGLYETRIDLSQLGGDAGDMRAANLWPSPLMIKRSKKNSLALSLTADQMVSALLDAEPPILYSEYDPTRPFSEASMMGLLTNLADRELVHMINWAKRVPGFVDLTLHDQVHLLECAWLEILMIGLVWRSMEHPVKLLFAPNLLLDRNQGKCVEGMVEIFDMLLATSSRFRMMNLQGEEFVCLKSIILLNSGVYTFLSSTLKSLEEKDHIHRVLDKITDTLIHLMAKAGLTLQQQHQRLAQLLLILSHIRHMSNKGMEHLYSMKCKNVVPLYDLLLEAADAHRLHAPTSRGGASVEETDQSHLATAGSTSSHSLQKYYITGEAEGFPATA

SEQ ID NO: 16 - protein, 2017 aa, Artificial sequence
  Cas9 variant 2 linkers
APKKKRKVGIHGVPAATGAGDMRAANLWPSPLMIKRSKKNSLALSLTADQMVSALLDAEPPILYSEYDPTRPFSEASMMGLLTNLADRELVHMINWAKRVPGFVDLTLHDQVHLLECAWLEILMIGLVWRSMEHPVKLLFAPNLLLDRNQGKCVEGMVEIFDMLLATSSRFRMMNLQGEEFVCLKSIILLNSGVYTFLSSTLKSLEEKDHIHRVLDKITDTLIHLMAKAGLTLQQQHQRLAQLLLILSHIRHMSNKGMEHLYSMKCKNVVPLYDLLLEAADAHRLHAPTSRGGASVEETDQSHLATAGSTSSHSLQKYYITGEAEGFPATASGSEGADKKYSIGLDIGTNSVGWAVITDEYKVPSKKFKVLGNTDRHSIKKNLIGALLFDSGETAEATRLKRTARRRYTRRKNRICYLQEIFSNEMAKVDDSFFHRLEESFLVEEDKKHERHPIFGNIVDEVAYHEKYPTIYHLRKKLVDSTDKADLRLIYLALAHMIKFRGHFLIEGDLNPDNSDVDKLFIQLVQTYNQLFEENPINASGVDAKAILSARLSKSRRLENLIAQLPGEKKNGLFGNLIALSLGLTPNFKSNFDLAEDAKLQLSKDTYDDDLDNLLAQIGDQYADLFLAAKNLSDAILLSDILRVNTEITKAPLSASMIKRYDEHHQDLTLLKALVRQQLPEKYKEIFFDQSKNGYAGYIDGGASQEEFYKFIKPILEKMDGTEELLVKLNREDLLRKQRTFDNGSIPHQIHLGELHAILRRQEDFYPFLKDNREKIEKILTFRIPYYVGPLARGNSRFAWMTRKSEETITPWNFEEVVDKGASAQSFIERMTNFDKNLPNEKVLPKHSLLYEYFTVYNELTKVKYVTEGMRKPAFLSGEQKKAIVDLLFKTNRKVTVKQLKEDYFKKIECFDSVEISGVEDRFNASLGTYHDLLKIIKDKDFLDNEENEDILEDIVLTLTLFEDREMIEERLKTYAHLFDDKVMKQLKRRRYTGWGRLSRKLINGIRDKQSGKTILDFLKSDGFANRNFMQLIHDDSLTFKEDIQKAQVSGQGDSLHEHIANLAGSPAIKKGILQTVKVVDELVKVMGRHKPENIVIEMARENQTTQKGQKNSRERMKRIEEGIKELGSQILKEHPVENTQLQNEKLYLYYLQNGRDMYVDQELDINRLSDYDVDHIVPQSFLKDDSIDNKVLTRSDKNRGKSDNVPSEEVVKKMKNYWRQLLNAKLITQRKFDNLTKAERGGLSELDKAGFIKRQLVETRQITKHVAQILDSRMNTKYDENDKLIREVKVITLKSKLVSDFRKDFQFYKVREINNYHHAHDAYLNAVVGTALIKKYPKLESEFVYGDYKVYDVRKMIAKSEQEIGKATAKYFFYSNIMNFFKTEITLANGEIRKRPLIETNGETGEIVWDKGRDFATVRKVLSMPQVNIVKKTEVQTGGFSKESILPKRNSDKLIARKKDWDPKKYGGFDSPTVAYSVLVVAKVEKGKSKKLKSVKELLGITIMERSSFEKNPIDFLEAKGYKEVKKDLIIKLPKYSLFELENGRKRMLASAGELQKGNELALPSKYVNFLYLASHYEKLKGSPEDNEQKQLFVEQHKHYLDEIIEQISEFSKRVILADANLDKVLSAYNKHRDKPIREQAENIIHLFTLTNLGAPAAFKYFDTTIDRKRYTSTKEVLDATLIHQSITGLYETRIDLSQLGGDAGDMRAANLWPSPLMIKRSKKNSLALSLTADQMVSALLDAEPPILYSEYDPTRPFSEASMMGLLTNLADRELVHMINWAKRVPGFVDLTLHDQVHLLECAWLEILMIGLVWRSMEHPVKLLFAPNLLLDRNQGKCVEGMVEIFDMLLATSSRFRMMNLQGEEFVCLKSIILLNSGVYTFLSSTLKSLEEKDHIHRVLDKITDTLIHLMAKAGLTLQQQHQRLAQLLLILSHIRHMSNKGMEHLYSMKCKNVVPLYDLLLEAADAHRLHAPTSRGGASVEETDQSHLATAGSTSSHSLQKYYITGEAEGFPATA

SEQ ID NO: 17 - protein, 2020 aa, Artificial sequence
  Cas9 variant 9 linkers
APKKKRKVGIHGVPAATGAGDMRAANLWPSPLMIKRSKKNSLALSLTADQMVSALLDAEPPILYSEYDPTRPFSEASMMGLLTNLADRELVHMINWAKRVPGFVDLTLHDQVHLLECAWLEILMIGLVWRSMEHPVKLLFAPNLLLDRNQGKCVEGMVEIFDMLLATSSRFRMMNLQGEEFVCLKSIILLNSGVYTFLSSTLKSLEEKDHIHRVLDKITDTLIHLMAKAGLTLQQQHQRLAQLLLILSHIRHMSNKGMEHLYSMKCKNVVPLYDLLLEAADAHRLHAPTSRGGASVEETDQSHLATAGSTSSHSLQKYYITGEAEGFPATAGASGSKTPGDKKYSIGLDIGTNSVGWAVITDEYKVPSKKFKVLGNTDRHSIKKNLIGALLFDSGETAEATRLKRTARRRYTRRKNRICYLQEIFSNEMAKVDDSFFHRLEESFLVEEDKKHERHPIFGNIVDEVAYHEKYPTIYHLRKKLVDSTDKADLRLIYLALAHMIKFRGHFLIEGDLNPDNSDVDKLFIQLVQTYNQLFEENPINASGVDAKAILSARLSKSRRLENLIAQLPGEKKNGLFGNLIALSLGLTPNFKSNFDLAEDAKLQLSKDTYDDDLDNLLAQIGDQYADLFLAAKNLSDAILLSDILRVNTEITKAPLSASMIKRYDEHHQDLTLLKALVRQQLPEKYKEIFFDQSKNGYAGYIDGGASQEEFYKFIKPILEKMDGTEELLVKLNREDLLRKQRTFDNGSIPHQIHLGELHAILRRQEDFYPFLKDNREKIEKILTFRIPYYVGPLARGNSRFAWMTRKSEETITPWNFEEVVDKGASAQSFIERMTNFDKNLPNEKVLPKHSLLYEYFTVYNELTKVKYVTEGMRKPAFLSGEQKKAIVDLLFKTNRKVTVKQLKEDYFKKIECFDSVEISGVEDRFNASLGTYHDLLKIIKDKDFLDNEENEDILEDIVLTLTLFEDREMIEERLKTYAHLFDDKVMKQLKRRRYTGWGRLSRKLINGIRDKQSGKTILDFLKSDGFANRNFMQLIHDDSLTFKEDIQKAQVSGQGDSLHEHIANLAGSPAIKKGILQTVKVVDELVKVMGRHKPENIVIEMARENQTTQKGQKNSRERMKRIEEGIKELGSQILKEHPVENTQLQNEKLYLYYLQNGRDMYVDQELDINRLSDYDVDHIVPQSFLKDDSIDNKVLTRSDKNRGKSDNVPSEEVVKKMKNYWRQLLNAKLITQRKFDNLTKAERGGLSELDKAGFIKRQLVETRQITKHVAQILDSRMNTKYDENDKLIREVKVITLKSKLVSDFRKDFQFYKVREINNYHHAHDAYLNAVVGTALIKKYPKLESEFVYGDYKVYDVRKMIAKSEQEIGKATAKYFFYSNIMNFFKTEITLANGEIRKRPLIETNGETGEIVWDKGRDFATVRKVLSMPQVNIVKKTEVQTGGFSKESILPKRNSDKLIARKKDWDPKKYGGFDSPTVAYSVLVVAKVEKGKSKKLKSVKELLGITIMERSSFEKNPIDFLEAKGYKEVKKDLIIKLPKYSLFELENGRKRMLASAGELQKGNELALPSKYVNFLYLASHYEKLKGSPEDNEQKQLFVEQHKHYLDEIIEQISEFSKRVILADANLDKVLSAYNKHRDKPIREQAENIIHLFTLTNLGAPAAFKYFDTTIDRKRYTSTKEVLDATLIHQSITGLYETRIDLSQLGGDAGDMRAANLWPSPLMIKRSKKNSLALSLTADQMVSALLDAEPPILYSEYDPTRPFSEASMMGLLTNLADRELVHMINWAKRVPGFVDLTLHDQVHLLECAWLEILMIGLVWRSMEHPVKLLFAPNLLLDRNQGKCVEGMVEIFDMLLATSSRFRMMNLQGEEFVCLKSIILLNSGVYTFLSSTLKSLEEKDHIHRVLDKITDTLIHLMAKAGLTLQQQHQRLAQLLLILSHIRHMSNKGMEHLYSMKCKNVVPLYDLLLEAADAHRLHAPTSRGGASVEETDQSHLATAGSTSSHSLQKYYITGEAEGFPATA

SEQ ID NO: 18 - protein, 2025 aa, Artificial sequence
  Cas9 variant 1 linkers
APKKKRKVGIHGVPAATGAGDMRAANLWPSPLMIKRSKKNSLALSLTADQMVSALLDAEPPILYSEYDPTRPFSEASMMGLLTNLADRELVHMINWAKRVPGFVDLTLHDQVHLLECAWLEILMIGLVWRSMEHPVKLLFAPNLLLDRNQGKCVEGMVEIFDMLLATSSRFRMMNLQGEEFVCLKSIILLNSGVYTFLSSTLKSLEEKDHIHRVLDKITDTLIHLMAKAGLTLQQQHQRLAQLLLILSHIRHMSNKGMEHLYSMKCKNVVPLYDLLLEAADAHRLHAPTSRGGASVEETDQSHLATAGSTSSHSLQKYYITGEAEGFPATASGSETPGTSESAGADKKYSIGLDIGTNSVGWAVITDEYKVPSKKFKVLGNTDRHSIKKNLIGALLFDSGETAEATRLKRTARRRYTRRKNRICYLQEIFSNEMAKVDDSFFHRLEESFLVEEDKKHERHPIFGNIVDEVAYHEKYPTIYHLRKKLVDSTDKADLRLIYLALAHMIKFRGHFLIEGDLNPDNSDVDKLFIQLVQTYNQLFEENPINASGVDAKAILSARLSKSRRLENLIAQLPGEKKNGLFGNLIALSLGLTPNFKSNFDLAEDAKLQLSKDTYDDDLDNLLAQIGDQYADLFLAAKNLSDAILLSDILRVNTEITKAPLSASMIKRYDEHHQDLTLLKALVRQQLPEKYKEIFFDQSKNGYAGYIDGGASQEEFYKFIKPILEKMDGTEELLVKLNREDLLRKQRTFDNGSIPHQIHLGELHAILRRQEDFYPFLKDNREKIEKILTFRIPYYVGPLARGNSRFAWMTRKSEETITPWNFEEVVDKGASAQSFIERMTNFDKNLPNEKVLPKHSLLYEYFTVYNELTKVKYVTEGMRKPAFLSGEQKKAIVDLLFKTNRKVTVKQLKEDYFKKIECFDSVEISGVEDRFNASLGTYHDLLKIIKDKDFLDNEENEDILEDIVLTLTLFEDREMIEERLKTYAHLFDDKVMKQLKRRRYTGWGRLSRKLINGIRDKQSGKTILDFLKSDGFANRNFMQLIHDDSLTFKEDIQKAQVSGQGDSLHEHIANLAGSPAIKKGILQTVKVVDELVKVMGRHKPENIVIEMARENQTTQKGQKNSRERMKRIEEGIKELGSQILKEHPVENTQLQNEKLYLYYLQNGRDMYVDQELDINRLSDYDVDHIVPQSFLKDDSIDNKVLTRSDKNRGKSDNVPSEEVVKKMKNYWRQLLNAKLITQRKFDNLTKAERGGLSELDKAGFIKRQLVETRQITKHVAQILDSRMNTKYDENDKLIREVKVITLKSKLVSDFRKDFQFYKVREINNYHHAHDAYLNAVVGTALIKKYPKLESEFVYGDYKVYDVRKMIAKSEQEIGKATAKYFFYSNIMNFFKTEITLANGEIRKRPLIETNGETGEIVWDKGRDFATVRKVLSMPQVNIVKKTEVQTGGFSKESILPKRNSDKLIARKKDWDPKKYGGFDSPTVAYSVLVVAKVEKGKSKKLKSVKELLGITIMERSSFEKNPIDFLEAKGYKEVKKDLIIKLPKYSLFELENGRKRMLASAGELQKGNELALPSKYVNFLYLASHYEKLKGSPEDNEQKQLFVEQHKHYLDEIIEQISEFSKRVILADANLDKVLSAYNKHRDKPIREQAENIIHLFTLTNLGAPAAFKYFDTTIDRKRYTSTKEVLDATLIHQSITGLYETRIDLSQLGGDAGDMRAANLWPSPLMIKRSKKNSLALSLTADQMVSALLDAEPPILYSEYDPTRPFSEASMMGLLTNLADRELVHMINWAKRVPGFVDLTLHDQVHLLECAWLEILMIGLVWRSMEHPVKLLFAPNLLLDRNQGKCVEGMVEIFDMLLATSSRFRMMNLQGEEFVCLKSIILLNSGVYTFLSSTLKSLEEKDHIHRVLDKITDTLIHLMAKAGLTLQQQHQRLAQLLLILSHIRHMSNKGMEHLYSMKCKNVVPLYDLLLEAADAHRLHAPTSRGGASVEETDQSHLATAGSTSSHSLQKYYITGEAEGFPATA

SEQ ID NO: 19 - protein, 2024 aa, Artificial sequence
  Cas9 variant 5 linkers
APKKKRKVGIHGVPAATGAGDMRAANLWPSPLMIKRSKKNSLALSLTADQMVSALLDAEPPILYSEYDPTRPFSEASMMGLLTNLADRELVHMINWAKRVPGFVDLTLHDQVHLLECAWLEILMIGLVWRSMEHPVKLLFAPNLLLDRNQGKCVEGMVEIFDMLLATSSRFRMMNLQGEEFVCLKSIILLNSGVYTFLSSTLKSLEEKDHIHRVLDKITDTLIHLMAKAGLTLQQQHQRLAQLLLILSHIRHMSNKGMEHLYSMKCKNVVPLYDLLLEAADAHRLHAPTSRGGASVEETDQSHLATAGSTSSHSLQKYYITGEAEGFPATASGSETPGTGPGGADKKYSIGLDIGTNSVGWAVITDEYKVPSKKFKVLGNTDRHSIKKNLIGALLFDSGETAEATRLKRTARRRYTRRKNRICYLQEIFSNEMAKVDDSFFHRLEESFLVEEDKKHERHPIFGNIVDEVAYHEKYPTIYHLRKKLVDSTDKADLRLIYLALAHMIKFRGHFLIEGDLNPDNSDVDKLFIQLVQTYNQLFEENPINASGVDAKAILSARLSKSRRLENLIAQLPGEKKNGLFGNLIALSLGLTPNFKSNFDLAEDAKLQLSKDTYDDDLDNLLAQIGDQYADLFLAAKNLSDAILLSDILRVNTEITKAPLSASMIKRYDEHHQDLTLLKALVRQQLPEKYKEIFFDQSKNGYAGYIDGGASQEEFYKFIKPILEKMDGTEELLVKLNREDLLRKQRTFDNGSIPHQIHLGELHAILRRQEDFYPFLKDNREKIEKILTFRIPYYVGPLARGNSRFAWMTRKSEETITPWNFEEVVDKGASAQSFIERMTNFDKNLPNEKVLPKHSLLYEYFTVYNELTKVKYVTEGMRKPAFLSGEQKKAIVDLLFKTNRKVTVKQLKEDYFKKIECFDSVEISGVEDRFNASLGTYHDLLKIIKDKDFLDNEENEDILEDIVLTLTLFEDREMIEERLKTYAHLFDDKVMKQLKRRRYTGWGRLSRKLINGIRDKQSGKTILDFLKSDGFANRNFMQLIHDDSLTFKEDIQKAQVSGQGDSLHEHIANLAGSPAIKKGILQTVKVVDELVKVMGRHKPENIVIEMARENQTTQKGQKNSRERMKRIEEGIKELGSQILKEHPVENTQLQNEKLYLYYLQNGRDMYVDQELDINRLSDYDVDHIVPQSFLKDDSIDNKVLTRSDKNRGKSDNVPSEEVVKKMKNYWRQLLNAKLITQRKFDNLTKAERGGLSELDKAGFIKRQLVETRQITKHVAQILDSRMNTKYDENDKLIREVKVITLKSKLVSDFRKDFQFYKVREINNYHHAHDAYLNAVVGTALIKKYPKLESEFVYGDYKVYDVRKMIAKSEQEIGKATAKYFFYSNIMNFFKTEITLANGEIRKRPLIETNGETGEIVWDKGRDFATVRKVLSMPQVNIVKKTEVQTGGFSKESILPKRNSDKLIARKKDWDPKKYGGFDSPTVAYSVLVVAKVEKGKSKKLKSVKELLGITIMERSSFEKNPIDFLEAKGYKEVKKDLIIKLPKYSLFELENGRKRMLASAGELQKGNELALPSKYVNFLYLASHYEKLKGSPEDNEQKQLFVEQHKHYLDEIIEQISEFSKRVILADANLDKVLSAYNKHRDKPIREQAENIIHLFTLTNLGAPAAFKYFDTTIDRKRYTSTKEVLDATLIHQSITGLYETRIDLSQLGGDAGDMRAANLWPSPLMIKRSKKNSLALSLTADQMVSALLDAEPPILYSEYDPTRPFSEASMMGLLTNLADRELVHMINWAKRVPGFVDLTLHDQVHLLECAWLEILMIGLVWRSMEHPVKLLFAPNLLLDRNQGKCVEGMVEIFDMLLATSSRFRMMNLQGEEFVCLKSIILLNSGVYTFLSSTLKSLEEKDHIHRVLDKITDTLIHLMAKAGLTLQQQHQRLAQLLLILSHIRHMSNKGMEHLYSMKCKNVVPLYDLLLEAADAHRLHAPTSRGGASVEETDQSHLATAGSTSSHSLQKYYITGEAEGFPATA

SEQ ID NO: 20 - protein, 2021 aa, Artificial sequence
  Cas9 variant 6 linkers
APKKKRKVGIHGVPAATGAGDMRAANLWPSPLMIKRSKKNSLALSLTADQMVSALLDAEPPILYSEYDPTRPFSEASMMGLLTNLADRELVHMINWAKRVPGFVDLTLHDQVHLLECAWLEILMIGLVWRSMEHPVKLLFAPNLLLDRNQGKCVEGMVEIFDMLLATSSRFRMMNLQGEEFVCLKSIILLNSGVYTFLSSTLKSLEEKDHIHRVLDKITDTLIHLMAKAGLTLQQQHQRLAQLLLILSHIRHMSNKGMEHLYSMKCKNVVPLYDLLLEAADAHRLHAPTSRGGASVEETDQSHLATAGSTSSHSLQKYYITGEAEGFPATASESATPESGADKKYSIGLDIGTNSVGWAVITDEYKVPSKKFKVLGNTDRHSIKKNLIGALLFDSGETAEATRLKRTARRRYTRRKNRICYLQEIFSNEMAKVDDSFFHRLEESFLVEEDKKHERHPIFGNIVDEVAYHEKYPTIYHLRKKLVDSTDKADLRLIYLALAHMIKFRGHFLIEGDLNPDNSDVDKLFIQLVQTYNQLFEENPINASGVDAKAILSARLSKSRRLENLIAQLPGEKKNGLFGNLIALSLGLTPNFKSNFDLAEDAKLQLSKDTYDDDLDNLLAQIGDQYADLFLAAKNLSDAILLSDILRVNTEITKAPLSASMIKRYDEHHQDLTLLKALVRQQLPEKYKEIFFDQSKNGYAGYIDGGASQEEFYKFIKPILEKMDGTEELLVKLNREDLLRKQRTFDNGSIPHQIHLGELHAILRRQEDFYPFLKDNREKIEKILTFRIPYYVGPLARGNSRFAWMTRKSEETITPWNFEEVVDKGASAQSFIERMTNFDKNLPNEKVLPKHSLLYEYFTVYNELTKVKYVTEGMRKPAFLSGEQKKAIVDLLFKTNRKVTVKQLKEDYFKKIECFDSVEISGVEDRFNASLGTYHDLLKIIKDKDFLDNEENEDILEDIVLTLTLFEDREMIEERLKTYAHLFDDKVMKQLKRRRYTGWGRLSRKLINGIRDKQSGKTILDFLKSDGFANRNFMQLIHDDSLTFKEDIQKAQVSGQGDSLHEHIANLAGSPAIKKGILQTVKVVDELVKVMGRHKPENIVIEMARENQTTQKGQKNSRERMKRIEEGIKELGSQILKEHPVENTQLQNEKLYLYYLQNGRDMYVDQELDINRLSDYDVDHIVPQSFLKDDSIDNKVLTRSDKNRGKSDNVPSEEVVKKMKNYWRQLLNAKLITQRKFDNLTKAERGGLSELDKAGFIKRQLVETRQITKHVAQILDSRMNTKYDENDKLIREVKVITLKSKLVSDFRKDFQFYKVREINNYHHAHDAYLNAVVGTALIKKYPKLESEFVYGDYKVYDVRKMIAKSEQEIGKATAKYFFYSNIMNFFKTEITLANGEIRKRPLIETNGETGEIVWDKGRDFATVRKVLSMPQVNIVKKTEVQTGGFSKESILPKRNSDKLIARKKDWDPKKYGGFDSPTVAYSVLVVAKVEKGKSKKLKSVKELLGITIMERSSFEKNPIDFLEAKGYKEVKKDLIIKLPKYSLFELENGRKRMLASAGELQKGNELALPSKYVNFLYLASHYEKLKGSPEDNEQKQLFVEQHKHYLDEIIEQISEFSKRVILADANLDKVLSAYNKHRDKPIREQAENIIHLFTLTNLGAPAAFKYFDTTIDRKRYTSTKEVLDATLIHQSITGLYETRIDLSQLGGDAGDMRAANLWPSPLMIKRSKKNSLALSLTADQMVSALLDAEPPILYSEYDPTRPFSEASMMGLLTNLADRELVHMINWAKRVPGFVDLTLHDQVHLLECAWLEILMIGLVWRSMEHPVKLLFAPNLLLDRNQGKCVEGMVEIFDMLLATSSRFRMMNLQGEEFVCLKSIILLNSGVYTFLSSTLKSLEEKDHIHRVLDKITDTLIHLMAKAGLTLQQQHQRLAQLLLILSHIRHMSNKGMEHLYSMKCKNVVPLYDLLLEAADAHRLHAPTSRGGASVEETDQSHLATAGSTSSHSLQKYYITGEAEGFPATA

SEQ ID NO: 21 - protein, 2024 aa, Artificial sequence
  Cas9 variant 4 linkers
APKKKRKVGIHGVPAATGAGDMRAANLWPSPLMIKRSKKNSLALSLTADQMVSALLDAEPPILYSEYDPTRPFSEASMMGLLTNLADRELVHMINWAKRVPGFVDLTLHDQVHLLECAWLEILMIGLVWRSMEHPVKLLFAPNLLLDRNQGKCVEGMVEIFDMLLATSSRFRMMNLQGEEFVCLKSIILLNSGVYTFLSSTLKSLEEKDHIHRVLDKITDTLIHLMAKAGLTLQQQHQRLAQLLLILSHIRHMSNKGMEHLYSMKCKNVVPLYDLLLEAADAHRLHAPTSRGGASVEETDQSHLATAGSTSSHSLQKYYITGEAEGFPATAGTSESATPESGGADKKYSIGLDIGTNSVGWAVITDEYKVPSKKFKVLGNTDRHSIKKNLIGALLFDSGETAEATRLKRTARRRYTRRKNRICYLQEIFSNEMAKVDDSFFHRLEESFLVEEDKKHERHPIFGNIVDEVAYHEKYPTIYHLRKKLVDSTDKADLRLIYLALAHMIKFRGHFLIEGDLNPDNSDVDKLFIQLVQTYNQLFEENPINASGVDAKAILSARLSKSRRLENLIAQLPGEKKNGLFGNLIALSLGLTPNFKSNFDLAEDAKLQLSKDTYDDDLDNLLAQIGDQYADLFLAAKNLSDAILLSDILRVNTEITKAPLSASMIKRYDEHHQDLTLLKALVRQQLPEKYKEIFFDQSKNGYAGYIDGGASQEEFYKFIKPILEKMDGTEELLVKLNREDLLRKQRTFDNGSIPHQIHLGELHAILRRQEDFYPFLKDNREKIEKILTFRIPYYVGPLARGNSRFAWMTRKSEETITPWNFEEVVDKGASAQSFIERMTNFDKNLPNEKVLPKHSLLYEYFTVYNELTKVKYVTEGMRKPAFLSGEQKKAIVDLLFKTNRKVTVKQLKEDYFKKIECFDSVEISGVEDRFNASLGTYHDLLKIIKDKDFLDNEENEDILEDIVLTLTLFEDREMIEERLKTYAHLFDDKVMKQLKRRRYTGWGRLSRKLINGIRDKQSGKTILDFLKSDGFANRNFMQLIHDDSLTFKEDIQKAQVSGQGDSLHEHIANLAGSPAIKKGILQTVKVVDELVKVMGRHKPENIVIEMARENQTTQKGQKNSRERMKRIEEGIKELGSQILKEHPVENTQLQNEKLYLYYLQNGRDMYVDQELDINRLSDYDVDHIVPQSFLKDDSIDNKVLTRSDKNRGKSDNVPSEEVVKKMKNYWRQLLNAKLITQRKFDNLTKAERGGLSELDKAGFIKRQLVETRQITKHVAQILDSRMNTKYDENDKLIREVKVITLKSKLVSDFRKDFQFYKVREINNYHHAHDAYLNAVVGTALIKKYPKLESEFVYGDYKVYDVRKMIAKSEQEIGKATAKYFFYSNIMNFFKTEITLANGEIRKRPLIETNGETGEIVWDKGRDFATVRKVLSMPQVNIVKKTEVQTGGFSKESILPKRNSDKLIARKKDWDPKKYGGFDSPTVAYSVLVVAKVEKGKSKKLKSVKELLGITIMERSSFEKNPIDFLEAKGYKEVKKDLIIKLPKYSLFELENGRKRMLASAGELQKGNELALPSKYVNFLYLASHYEKLKGSPEDNEQKQLFVEQHKHYLDEIIEQISEFSKRVILADANLDKVLSAYNKHRDKPIREQAENIIHLFTLTNLGAPAAFKYFDTTIDRKRYTSTKEVLDATLIHQSITGLYETRIDLSQLGGDAGDMRAANLWPSPLMIKRSKKNSLALSLTADQMVSALLDAEPPILYSEYDPTRPFSEASMMGLLTNLADRELVHMINWAKRVPGFVDLTLHDQVHLLECAWLEILMIGLVWRSMEHPVKLLFAPNLLLDRNQGKCVEGMVEIFDMLLATSSRFRMMNLQGEEFVCLKSIILLNSGVYTFLSSTLKSLEEKDHIHRVLDKITDTLIHLMAKAGLTLQQQHQRLAQLLLILSHIRHMSNKGMEHLYSMKCKNVVPLYDLLLEAADAHRLHAPTSRGGASVEETDQSHLATAGSTSSHSLQKYYITGEAEGFPATA

SEQ ID NO: 22 - protein, 2019 aa, Artificial sequence
  Cas9 variant 3 linkers
APKKKRKVGIHGVPAATGAGDMRAANLWPSPLMIKRSKKNSLALSLTADQMVSALLDAEPPILYSEYDPTRPFSEASMMGLLTNLADRELVHMINWAKRVPGFVDLTLHDQVHLLECAWLEILMIGLVWRSMEHPVKLLFAPNLLLDRNQGKCVEGMVEIFDMLLATSSRFRMMNLQGEEFVCLKSIILLNSGVYTFLSSTLKSLEEKDHIHRVLDKITDTLIHLMAKAGLTLQQQHQRLAQLLLILSHIRHMSNKGMEHLYSMKCKNVVPLYDLLLEAADAHRLHAPTSRGGASVEETDQSHLATAGSTSSHSLQKYYITGEAEGFPATAGGSGGSGADKKYSIGLDIGTNSVGWAVITDEYKVPSKKFKVLGNTDRHSIKKNLIGALLFDSGETAEATRLKRTARRRYTRRKNRICYLQEIFSNEMAKVDDSFFHRLEESFLVEEDKKHERHPIFGNIVDEVAYHEKYPTIYHLRKKLVDSTDKADLRLIYLALAHMIKFRGHFLIEGDLNPDNSDVDKLFIQLVQTYNQLFEENPINASGVDAKAILSARLSKSRRLENLIAQLPGEKKNGLFGNLIALSLGLTPNFKSNFDLAEDAKLQLSKDTYDDDLDNLLAQIGDQYADLFLAAKNLSDAILLSDILRVNTEITKAPLSASMIKRYDEHHQDLTLLKALVRQQLPEKYKEIFFDQSKNGYAGYIDGGASQEEFYKFIKPILEKMDGTEELLVKLNREDLLRKQRTFDNGSIPHQIHLGELHAILRRQEDFYPFLKDNREKIEKILTFRIPYYVGPLARGNSRFAWMTRKSEETITPWNFEEVVDKGASAQSFIERMTNFDKNLPNEKVLPKHSLLYEYFTVYNELTKVKYVTEGMRKPAFLSGEQKKAIVDLLFKTNRKVTVKQLKEDYFKKIECFDSVEISGVEDRFNASLGTYHDLLKIIKDKDFLDNEENEDILEDIVLTLTLFEDREMIEERLKTYAHLFDDKVMKQLKRRRYTGWGRLSRKLINGIRDKQSGKTILDFLKSDGFANRNFMQLIHDDSLTFKEDIQKAQVSGQGDSLHEHIANLAGSPAIKKGILQTVKVVDELVKVMGRHKPENIVIEMARENQTTQKGQKNSRERMKRIEEGIKELGSQILKEHPVENTQLQNEKLYLYYLQNGRDMYVDQELDINRLSDYDVDHIVPQSFLKDDSIDNKVLTRSDKNRGKSDNVPSEEVVKKMKNYWRQLLNAKLITQRKFDNLTKAERGGLSELDKAGFIKRQLVETRQITKHVAQILDSRMNTKYDENDKLIREVKVITLKSKLVSDFRKDFQFYKVREINNYHHAHDAYLNAVVGTALIKKYPKLESEFVYGDYKVYDVRKMIAKSEQEIGKATAKYFFYSNIMNFFKTEITLANGEIRKRPLIETNGETGEIVWDKGRDFATVRKVLSMPQVNIVKKTEVQTGGFSKESILPKRNSDKLIARKKDWDPKKYGGFDSPTVAYSVLVVAKVEKGKSKKLKSVKELLGITIMERSSFEKNPIDFLEAKGYKEVKKDLIIKLPKYSLFELENGRKRMLASAGELQKGNELALPSKYVNFLYLASHYEKLKGSPEDNEQKQLFVEQHKHYLDEIIEQISEFSKRVILADANLDKVLSAYNKHRDKPIREQAENIIHLFTLTNLGAPAAFKYFDTTIDRKRYTSTKEVLDATLIHQSITGLYETRIDLSQLGGDAGDMRAANLWPSPLMIKRSKKNSLALSLTADQMVSALLDAEPPILYSEYDPTRPFSEASMMGLLTNLADRELVHMINWAKRVPGFVDLTLHDQVHLLECAWLEILMIGLVWRSMEHPVKLLFAPNLLLDRNQGKCVEGMVEIFDMLLATSSRFRMMNLQGEEFVCLKSIILLNSGVYTFLSSTLKSLEEKDHIHRVLDKITDTLIHLMAKAGLTLQQQHQRLAQLLLILSHIRHMSNKGMEHLYSMKCKNVVPLYDLLLEAADAHRLHAPTSRGGASVEETDQSHLATAGSTSSHSLQKYYITGEAEGFPATA

SEQ ID NO: 23 - protein, 2019 aa, Artificial sequence
  Cas9 variant 11 linkers
APKKKRKVGIHGVPAATGPGPGGSAGDMRAANLWPSPLMIKRSKKNSLALSLTADQMVSALLDAEPPILYSEYDPTRPFSEASMMGLLTNLADRELVHMINWAKRVPGFVDLTLHDQVHLLECAWLEILMIGLVWRSMEHPVKLLFAPNLLLDRNQGKCVEGMVEIFDMLLATSSRFRMMNLQGEEFVCLKSIILLNSGVYTFLSSTLKSLEEKDHIHRVLDKITDTLIHLMAKAGLTLQQQHQRLAQLLLILSHIRHMSNKGMEHLYSMKCKNVVPLYDLLLEAADAHRLHAPTSRGGASVEETDQSHLATAGSTSSHSLQKYYITGEAEGFPATAGADKKYSIGLDIGTNSVGWAVITDEYKVPSKKFKVLGNTDRHSIKKNLIGALLFDSGETAEATRLKRTARRRYTRRKNRICYLQEIFSNEMAKVDDSFFHRLEESFLVEEDKKHERHPIFGNIVDEVAYHEKYPTIYHLRKKLVDSTDKADLRLIYLALAHMIKFRGHFLIEGDLNPDNSDVDKLFIQLVQTYNQLFEENPINASGVDAKAILSARLSKSRRLENLIAQLPGEKKNGLFGNLIALSLGLTPNFKSNFDLAEDAKLQLSKDTYDDDLDNLLAQIGDQYADLFLAAKNLSDAILLSDILRVNTEITKAPLSASMIKRYDEHHQDLTLLKALVRQQLPEKYKEIFFDQSKNGYAGYIDGGASQEEFYKFIKPILEKMDGTEELLVKLNREDLLRKQRTFDNGSIPHQIHLGELHAILRRQEDFYPFLKDNREKIEKILTFRIPYYVGPLARGNSRFAWMTRKSEETITPWNFEEVVDKGASAQSFIERMTNFDKNLPNEKVLPKHSLLYEYFTVYNELTKVKYVTEGMRKPAFLSGEQKKAIVDLLFKTNRKVTVKQLKEDYFKKIECFDSVEISGVEDRFNASLGTYHDLLKIIKDKDFLDNEENEDILEDIVLTLTLFEDREMIEERLKTYAHLFDDKVMKQLKRRRYTGWGRLSRKLINGIRDKQSGKTILDFLKSDGFANRNFMQLIHDDSLTFKEDIQKAQVSGQGDSLHEHIANLAGSPAIKKGILQTVKVVDELVKVMGRHKPENIVIEMARENQTTQKGQKNSRERMKRIEEGIKELGSQILKEHPVENTQLQNEKLYLYYLQNGRDMYVDQELDINRLSDYDVDHIVPQSFLKDDSIDNKVLTRSDKNRGKSDNVPSEEVVKKMKNYWRQLLNAKLITQRKFDNLTKAERGGLSELDKAGFIKRQLVETRQITKHVAQILDSRMNTKYDENDKLIREVKVITLKSKLVSDFRKDFQFYKVREINNYHHAHDAYLNAVVGTALIKKYPKLESEFVYGDYKVYDVRKMIAKSEQEIGKATAKYFFYSNIMNFFKTEITLANGEIRKRPLIETNGETGEIVWDKGRDFATVRKVLSMPQVNIVKKTEVQTGGFSKESILPKRNSDKLIARKKDWDPKKYGGFDSPTVAYSVLVVAKVEKGKSKKLKSVKELLGITIMERSSFEKNPIDFLEAKGYKEVKKDLIIKLPKYSLFELENGRKRMLASAGELQKGNELALPSKYVNFLYLASHYEKLKGSPEDNEQKQLFVEQHKHYLDEIIEQISEFSKRVILADANLDKVLSAYNKHRDKPIREQAENIIHLFTLTNLGAPAAFKYFDTTIDRKRYTSTKEVLDATLIHQSITGLYETRIDLSQLGGDAGDMRAANLWPSPLMIKRSKKNSLALSLTADQMVSALLDAEPPILYSEYDPTRPFSEASMMGLLTNLADRELVHMINWAKRVPGFVDLTLHDQVHLLECAWLEILMIGLVWRSMEHPVKLLFAPNLLLDRNQGKCVEGMVEIFDMLLATSSRFRMMNLQGEEFVCLKSIILLNSGVYTFLSSTLKSLEEKDHIHRVLDKITDTLIHLMAKAGLTLQQQHQRLAQLLLILSHIRHMSNKGMEHLYSMKCKNVVPLYDLLLEAADAHRLHAPTSRGGASVEETDQSHLATAGSTSSHSLQKYYITGEAEGFPATA

SEQ ID NO: 24 - protein, 2031 aa, Artificial sequence
  Cas9 variant 14 linkers
APKKKRKVGIHGVPAATGPGPGGSAGDTTGPGTGPGAGDMRAANLWPSPLMIKRSKKNSLALSLTADQMVSALLDAEPPILYSEYDPTRPFSEASMMGLLTNLADRELVHMINWAKRVPGFVDLTLHDQVHLLECAWLEILMIGLVWRSMEHPVKLLFAPNLLLDRNQGKCVEGMVEIFDMLLATSSRFRMMNLQGEEFVCLKSIILLNSGVYTFLSSTLKSLEEKDHIHRVLDKITDTLIHLMAKAGLTLQQQHQRLAQLLLILSHIRHMSNKGMEHLYSMKCKNVVPLYDLLLEAADAHRLHAPTSRGGASVEETDQSHLATAGSTSSHSLQKYYITGEAEGFPATAGADKKYSIGLDIGTNSVGWAVITDEYKVPSKKFKVLGNTDRHSIKKNLIGALLFDSGETAEATRLKRTARRRYTRRKNRICYLQEIFSNEMAKVDDSFFHRLEESFLVEEDKKHERHPIFGNIVDEVAYHEKYPTIYHLRKKLVDSTDKADLRLIYLALAHMIKFRGHFLIEGDLNPDNSDVDKLFIQLVQTYNQLFEENPINASGVDAKAILSARLSKSRRLENLIAQLPGEKKNGLFGNLIALSLGLTPNFKSNFDLAEDAKLQLSKDTYDDDLDNLLAQIGDQYADLFLAAKNLSDAILLSDILRVNTEITKAPLSASMIKRYDEHHQDLTLLKALVRQQLPEKYKEIFFDQSKNGYAGYIDGGASQEEFYKFIKPILEKMDGTEELLVKLNREDLLRKQRTFDNGSIPHQIHLGELHAILRRQEDFYPFLKDNREKIEKILTFRIPYYVGPLARGNSRFAWMTRKSEETITPWNFEEVVDKGASAQSFIERMTNFDKNLPNEKVLPKHSLLYEYFTVYNELTKVKYVTEGMRKPAFLSGEQKKAIVDLLFKTNRKVTVKQLKEDYFKKIECFDSVEISGVEDRFNASLGTYHDLLKIIKDKDFLDNEENEDILEDIVLTLTLFEDREMIEERLKTYAHLFDDKVMKQLKRRRYTGWGRLSRKLINGIRDKQSGKTILDFLKSDGFANRNFMQLIHDDSLTFKEDIQKAQVSGQGDSLHEHIANLAGSPAIKKGILQTVKVVDELVKVMGRHKPENIVIEMARENQTTQKGQKNSRERMKRIEEGIKELGSQILKEHPVENTQLQNEKLYLYYLQNGRDMYVDQELDINRLSDYDVDHIVPQSFLKDDSIDNKVLTRSDKNRGKSDNVPSEEVVKKMKNYWRQLLNAKLITQRKFDNLTKAERGGLSELDKAGFIKRQLVETRQITKHVAQILDSRMNTKYDENDKLIREVKVITLKSKLVSDFRKDFQFYKVREINNYHHAHDAYLNAVVGTALIKKYPKLESEFVYGDYKVYDVRKMIAKSEQEIGKATAKYFFYSNIMNFFKTEITLANGEIRKRPLIETNGETGEIVWDKGRDFATVRKVLSMPQVNIVKKTEVQTGGFSKESILPKRNSDKLIARKKDWDPKKYGGFDSPTVAYSVLVVAKVEKGKSKKLKSVKELLGITIMERSSFEKNPIDFLEAKGYKEVKKDLIIKLPKYSLFELENGRKRMLASAGELQKGNELALPSKYVNFLYLASHYEKLKGSPEDNEQKQLFVEQHKHYLDEIIEQISEFSKRVILADANLDKVLSAYNKHRDKPIREQAENIIHLFTLTNLGAPAAFKYFDTTIDRKRYTSTKEVLDATLIHQSITGLYETRIDLSQLGGDAGDMRAANLWPSPLMIKRSKKNSLALSLTADQMVSALLDAEPPILYSEYDPTRPFSEASMMGLLTNLADRELVHMINWAKRVPGFVDLTLHDQVHLLECAWLEILMIGLVWRSMEHPVKLLFAPNLLLDRNQGKCVEGMVEIFDMLLATSSRFRMMNLQGEEFVCLKSIILLNSGVYTFLSSTLKSLEEKDHIHRVLDKITDTLIHLMAKAGLTLQQQHQRLAQLLLILSHIRHMSNKGMEHLYSMKCKNVVPLYDLLLEAADAHRLHAPTSRGGASVEETDQSHLATAGSTSSHSLQKYYITGEAEGFPATA

SEQ ID NO: 25 - protein, 2017 aa, Artificial sequence
  Cas9 variant 19 linkers
APKKKRKVGIHGVPAATGAGDMRAANLWPSPLMIKRSKKNSLALSLTADQMVSALLDAEPPILYSEYDPTRPFSEASMMGLLTNLADRELVHMINWAKRVPGFVDLTLHDQVHLLECAWLEILMIGLVWRSMEHPVKLLFAPNLLLDRNQGKCVEGMVEIFDMLLATSSRFRMMNLQGEEFVCLKSIILLNSGVYTFLSSTLKSLEEKDHIHRVLDKITDTLIHLMAKAGLTLQQQHQRLAQLLLILSHIRHMSNKGMEHLYSMKCKNVVPLYDLLLEAADAHRLHAPTSRGGASVEETDQSHLATAGSTSSHSLQKYYITGEAEGFPATAGADKKYSIGLDIGTNSVGWAVITDEYKVPSKKFKVLGNTDRHSIKKNLIGALLFDSGETAEATRLKRTARRRYTRRKNRICYLQEIFSNEMAKVDDSFFHRLEESFLVEEDKKHERHPIFGNIVDEVAYHEKYPTIYHLRKKLVDSTDKADLRLIYLALAHMIKFRGHFLIEGDLNPDNSDVDKLFIQLVQTYNQLFEENPINASGVDAKAILSARLSKSRRLENLIAQLPGEKKNGLFGNLIALSLGLTPNFKSNFDLAEDAKLQLSKDTYDDDLDNLLAQIGDQYADLFLAAKNLSDAILLSDILRVNTEITKAPLSASMIKRYDEHHQDLTLLKALVRQQLPEKYKEIFFDQSKNGYAGYIDGGASQEEFYKFIKPILEKMDGTEELLVKLNREDLLRKQRTFDNGSIPHQIHLGELHAILRRQEDFYPFLKDNREKIEKILTFRIPYYVGPLARGNSRFAWMTRKSEETITPWNFEEVVDKGASAQSFIERMTNFDKNLPNEKVLPKHSLLYEYFTVYNELTKVKYVTEGMRKPAFLSGEQKKAIVDLLFKTNRKVTVKQLKEDYFKKIECFDSVEISGVEDRFNASLGTYHDLLKIIKDKDFLDNEENEDILEDIVLTLTLFEDREMIEERLKTYAHLFDDKVMKQLKRRRYTGWGRLSRKLINGIRDKQSGKTILDFLKSDGFANRNFMQLIHDDSLTFKEDIQKAQVSGQGDSLHEHIANLAGSPAIKKGILQTVKVVDELVKVMGRHKPENIVIEMARENQTTQKGQKNSRERMKRIEEGIKELGSQILKEHPVENTQLQNEKLYLYYLQNGRDMYVDQELDINRLSDYDVDHIVPQSFLKDDSIDNKVLTRSDKNRGKSDNVPSEEVVKKMKNYWRQLLNAKLITQRKFDNLTKAERGGLSELDKAGFIKRQLVETRQITKHVAQILDSRMNTKYDENDKLIREVKVITLKSKLVSDFRKDFQFYKVREINNYHHAHDAYLNAVVGTALIKKYPKLESEFVYGDYKVYDVRKMIAKSEQEIGKATAKYFFYSNIMNFFKTEITLANGEIRKRPLIETNGETGEIVWDKGRDFATVRKVLSMPQVNIVKKTEVQTGGFSKESILPKRNSDKLIARKKDWDPKKYGGFDSPTVAYSVLVVAKVEKGKSKKLKSVKELLGITIMERSSFEKNPIDFLEAKGYKEVKKDLIIKLPKYSLFELENGRKRMLASAGELQKGNELALPSKYVNFLYLASHYEKLKGSPEDNEQKQLFVEQHKHYLDEIIEQISEFSKRVILADANLDKVLSAYNKHRDKPIREQAENIIHLFTLTNLGAPAAFKYFDTTIDRKRYTSTKEVLDATLIHQSITGLYETRIDLSQLGGDGGGSAGDMRAANLWPSPLMIKRSKKNSLALSLTADQMVSALLDAEPPILYSEYDPTRPFSEASMMGLLTNLADRELVHMINWAKRVPGFVDLTLHDQVHLLECAWLEILMIGLVWRSMEHPVKLLFAPNLLLDRNQGKCVEGMVEIFDMLLATSSRFRMMNLQGEEFVCLKSIILLNSGVYTFLSSTLKSLEEKDHIHRVLDKITDTLIHLMAKAGLTLQQQHQRLAQLLLILSHIRHMSNKGMEHLYSMKCKNVVPLYDLLLEAADAHRLHAPTSRGGASVEETDQSHLATAGSTSSHSLQKYYITGEAEGFPATA

SEQ ID NO: 26 - protein, 2020 aa, Artificial sequence
  Cas9 variant 13 linkers
APKKKRKVGIHGVPAATGGGSAGDMRAANLWPSPLMIKRSKKNSLALSLTADQMVSALLDAEPPILYSEYDPTRPFSEASMMGLLTNLADRELVHMINWAKRVPGFVDLTLHDQVHLLECAWLEILMIGLVWRSMEHPVKLLFAPNLLLDRNQGKCVEGMVEIFDMLLATSSRFRMMNLQGEEFVCLKSIILLNSGVYTFLSSTLKSLEEKDHIHRVLDKITDTLIHLMAKAGLTLQQQHQRLAQLLLILSHIRHMSNKGMEHLYSMKCKNVVPLYDLLLEAADAHRLHAPTSRGGASVEETDQSHLATAGSTSSHSLQKYYITGEAEGFPATATPESGADKKYSIGLDIGTNSVGWAVITDEYKVPSKKFKVLGNTDRHSIKKNLIGALLFDSGETAEATRLKRTARRRYTRRKNRICYLQEIFSNEMAKVDDSFFHRLEESFLVEEDKKHERHPIFGNIVDEVAYHEKYPTIYHLRKKLVDSTDKADLRLIYLALAHMIKFRGHFLIEGDLNPDNSDVDKLFIQLVQTYNQLFEENPINASGVDAKAILSARLSKSRRLENLIAQLPGEKKNGLFGNLIALSLGLTPNFKSNFDLAEDAKLQLSKDTYDDDLDNLLAQIGDQYADLFLAAKNLSDAILLSDILRVNTEITKAPLSASMIKRYDEHHQDLTLLKALVRQQLPEKYKEIFFDQSKNGYAGYIDGGASQEEFYKFIKPILEKMDGTEELLVKLNREDLLRKQRTFDNGSIPHQIHLGELHAILRRQEDFYPFLKDNREKIEKILTFRIPYYVGPLARGNSRFAWMTRKSEETITPWNFEEVVDKGASAQSFIERMTNFDKNLPNEKVLPKHSLLYEYFTVYNELTKVKYVTEGMRKPAFLSGEQKKAIVDLLFKTNRKVTVKQLKEDYFKKIECFDSVEISGVEDRFNASLGTYHDLLKIIKDKDFLDNEENEDILEDIVLTLTLFEDREMIEERLKTYAHLFDDKVMKQLKRRRYTGWGRLSRKLINGIRDKQSGKTILDFLKSDGFANRNFMQLIHDDSLTFKEDIQKAQVSGQGDSLHEHIANLAGSPAIKKGILQTVKVVDELVKVMGRHKPENIVIEMARENQTTQKGQKNSRERMKRIEEGIKELGSQILKEHPVENTQLQNEKLYLYYLQNGRDMYVDQELDINRLSDYDVDHIVPQSFLKDDSIDNKVLTRSDKNRGKSDNVPSEEVVKKMKNYWRQLLNAKLITQRKFDNLTKAERGGLSELDKAGFIKRQLVETRQITKHVAQILDSRMNTKYDENDKLIREVKVITLKSKLVSDFRKDFQFYKVREINNYHHAHDAYLNAVVGTALIKKYPKLESEFVYGDYKVYDVRKMIAKSEQEIGKATAKYFFYSNIMNFFKTEITLANGEIRKRPLIETNGETGEIVWDKGRDFATVRKVLSMPQVNIVKKTEVQTGGFSKESILPKRNSDKLIARKKDWDPKKYGGFDSPTVAYSVLVVAKVEKGKSKKLKSVKELLGITIMERSSFEKNPIDFLEAKGYKEVKKDLIIKLPKYSLFELENGRKRMLASAGELQKGNELALPSKYVNFLYLASHYEKLKGSPEDNEQKQLFVEQHKHYLDEIIEQISEFSKRVILADANLDKVLSAYNKHRDKPIREQAENIIHLFTLTNLGAPAAFKYFDTTIDRKRYTSTKEVLDATLIHQSITGLYETRIDLSQLGGDAGDMRAANLWPSPLMIKRSKKNSLALSLTADQMVSALLDAEPPILYSEYDPTRPFSEASMMGLLTNLADRELVHMINWAKRVPGFVDLTLHDQVHLLECAWLEILMIGLVWRSMEHPVKLLFAPNLLLDRNQGKCVEGMVEIFDMLLATSSRFRMMNLQGEEFVCLKSIILLNSGVYTFLSSTLKSLEEKDHIHRVLDKITDTLIHLMAKAGLTLQQQHQRLAQLLLILSHIRHMSNKGMEHLYSMKCKNVVPLYDLLLEAADAHRLHAPTSRGGASVEETDQSHLATAGSTSSHSLQKYYITGEAEGFPATA

SEQ ID NO: 27 - protein, 2024 aa, Artificial sequence
  Cas9 variant 15 linkers
APKKKRKVGIHGVPAATGGGSAGDMRAANLWPSPLMIKRSKKNSLALSLTADQMVSALLDAEPPILYSEYDPTRPFSEASMMGLLTNLADRELVHMINWAKRVPGFVDLTLHDQVHLLECAWLEILMIGLVWRSMEHPVKLLFAPNLLLDRNQGKCVEGMVEIFDMLLATSSRFRMMNLQGEEFVCLKSIILLNSGVYTFLSSTLKSLEEKDHIHRVLDKITDTLIHLMAKAGLTLQQQHQRLAQLLLILSHIRHMSNKGMEHLYSMKCKNVVPLYDLLLEAADAHRLHAPTSRGGASVEETDQSHLATAGSTSSHSLQKYYITGEAEGFPATASESATPESGADKKYSIGLDIGTNSVGWAVITDEYKVPSKKFKVLGNTDRHSIKKNLIGALLFDSGETAEATRLKRTARRRYTRRKNRICYLQEIFSNEMAKVDDSFFHRLEESFLVEEDKKHERHPIFGNIVDEVAYHEKYPTIYHLRKKLVDSTDKADLRLIYLALAHMIKFRGHFLIEGDLNPDNSDVDKLFIQLVQTYNQLFEENPINASGVDAKAILSARLSKSRRLENLIAQLPGEKKNGLFGNLIALSLGLTPNFKSNFDLAEDAKLQLSKDTYDDDLDNLLAQIGDQYADLFLAAKNLSDAILLSDILRVNTEITKAPLSASMIKRYDEHHQDLTLLKALVRQQLPEKYKEIFFDQSKNGYAGYIDGGASQEEFYKFIKPILEKMDGTEELLVKLNREDLLRKQRTFDNGSIPHQIHLGELHAILRRQEDFYPFLKDNREKIEKILTFRIPYYVGPLARGNSRFAWMTRKSEETITPWNFEEVVDKGASAQSFIERMTNFDKNLPNEKVLPKHSLLYEYFTVYNELTKVKYVTEGMRKPAFLSGEQKKAIVDLLFKTNRKVTVKQLKEDYFKKIECFDSVEISGVEDRFNASLGTYHDLLKIIKDKDFLDNEENEDILEDIVLTLTLFEDREMIEERLKTYAHLFDDKVMKQLKRRRYTGWGRLSRKLINGIRDKQSGKTILDFLKSDGFANRNFMQLIHDDSLTFKEDIQKAQVSGQGDSLHEHIANLAGSPAIKKGILQTVKVVDELVKVMGRHKPENIVIEMARENQTTQKGQKNSRERMKRIEEGIKELGSQILKEHPVENTQLQNEKLYLYYLQNGRDMYVDQELDINRLSDYDVDHIVPQSFLKDDSIDNKVLTRSDKNRGKSDNVPSEEVVKKMKNYWRQLLNAKLITQRKFDNLTKAERGGLSELDKAGFIKRQLVETRQITKHVAQILDSRMNTKYDENDKLIREVKVITLKSKLVSDFRKDFQFYKVREINNYHHAHDAYLNAVVGTALIKKYPKLESEFVYGDYKVYDVRKMIAKSEQEIGKATAKYFFYSNIMNFFKTEITLANGEIRKRPLIETNGETGEIVWDKGRDFATVRKVLSMPQVNIVKKTEVQTGGFSKESILPKRNSDKLIARKKDWDPKKYGGFDSPTVAYSVLVVAKVEKGKSKKLKSVKELLGITIMERSSFEKNPIDFLEAKGYKEVKKDLIIKLPKYSLFELENGRKRMLASAGELQKGNELALPSKYVNFLYLASHYEKLKGSPEDNEQKQLFVEQHKHYLDEIIEQISEFSKRVILADANLDKVLSAYNKHRDKPIREQAENIIHLFTLTNLGAPAAFKYFDTTIDRKRYTSTKEVLDATLIHQSITGLYETRIDLSQLGGDAGDMRAANLWPSPLMIKRSKKNSLALSLTADQMVSALLDAEPPILYSEYDPTRPFSEASMMGLLTNLADRELVHMINWAKRVPGFVDLTLHDQVHLLECAWLEILMIGLVWRSMEHPVKLLFAPNLLLDRNQGKCVEGMVEIFDMLLATSSRFRMMNLQGEEFVCLKSIILLNSGVYTFLSSTLKSLEEKDHIHRVLDKITDTLIHLMAKAGLTLQQQHQRLAQLLLILSHIRHMSNKGMEHLYSMKCKNVVPLYDLLLEAADAHRLHAPTSRGGASVEETDQSHLATAGSTSSHSLQKYYITGEAEGFPATA

SEQ ID NO: 28 - protein, 2020 aa, Artificial sequence
  Cas9 variant 16 linkers
APKKKRKVGIHGVPAATGGGSAGDMRAANLWPSPLMIKRSKKNSLALSLTADQMVSALLDAEPPILYSEYDPTRPFSEASMMGLLTNLADRELVHMINWAKRVPGFVDLTLHDQVHLLECAWLEILMIGLVWRSMEHPVKLLFAPNLLLDRNQGKCVEGMVEIFDMLLATSSRFRMMNLQGEEFVCLKSIILLNSGVYTFLSSTLKSLEEKDHIHRVLDKITDTLIHLMAKAGLTLQQQHQRLAQLLLILSHIRHMSNKGMEHLYSMKCKNVVPLYDLLLEAADAHRLHAPTSRGGASVEETDQSHLATAGSTSSHSLQKYYITGEAEGFPATASGSEGADKKYSIGLDIGTNSVGWAVITDEYKVPSKKFKVLGNTDRHSIKKNLIGALLFDSGETAEATRLKRTARRRYTRRKNRICYLQEIFSNEMAKVDDSFFHRLEESFLVEEDKKHERHPIFGNIVDEVAYHEKYPTIYHLRKKLVDSTDKADLRLIYLALAHMIKFRGHFLIEGDLNPDNSDVDKLFIQLVQTYNQLFEENPINASGVDAKAILSARLSKSRRLENLIAQLPGEKKNGLFGNLIALSLGLTPNFKSNFDLAEDAKLQLSKDTYDDDLDNLLAQIGDQYADLFLAAKNLSDAILLSDILRVNTEITKAPLSASMIKRYDEHHQDLTLLKALVRQQLPEKYKEIFFDQSKNGYAGYIDGGASQEEFYKFIKPILEKMDGTEELLVKLNREDLLRKQRTFDNGSIPHQIHLGELHAILRRQEDFYPFLKDNREKIEKILTFRIPYYVGPLARGNSRFAWMTRKSEETITPWNFEEVVDKGASAQSFIERMTNFDKNLPNEKVLPKHSLLYEYFTVYNELTKVKYVTEGMRKPAFLSGEQKKAIVDLLFKTNRKVTVKQLKEDYFKKIECFDSVEISGVEDRFNASLGTYHDLLKIIKDKDFLDNEENEDILEDIVLTLTLFEDREMIEERLKTYAHLFDDKVMKQLKRRRYTGWGRLSRKLINGIRDKQSGKTILDFLKSDGFANRNFMQLIHDDSLTFKEDIQKAQVSGQGDSLHEHIANLAGSPAIKKGILQTVKVVDELVKVMGRHKPENIVIEMARENQTTQKGQKNSRERMKRIEEGIKELGSQILKEHPVENTQLQNEKLYLYYLQNGRDMYVDQELDINRLSDYDVDHIVPQSFLKDDSIDNKVLTRSDKNRGKSDNVPSEEVVKKMKNYWRQLLNAKLITQRKFDNLTKAERGGLSELDKAGFIKRQLVETRQITKHVAQILDSRMNTKYDENDKLIREVKVITLKSKLVSDFRKDFQFYKVREINNYHHAHDAYLNAVVGTALIKKYPKLESEFVYGDYKVYDVRKMIAKSEQEIGKATAKYFFYSNIMNFFKTEITLANGEIRKRPLIETNGETGEIVWDKGRDFATVRKVLSMPQVNIVKKTEVQTGGFSKESILPKRNSDKLIARKKDWDPKKYGGFDSPTVAYSVLVVAKVEKGKSKKLKSVKELLGITIMERSSFEKNPIDFLEAKGYKEVKKDLIIKLPKYSLFELENGRKRMLASAGELQKGNELALPSKYVNFLYLASHYEKLKGSPEDNEQKQLFVEQHKHYLDEIIEQISEFSKRVILADANLDKVLSAYNKHRDKPIREQAENIIHLFTLTNLGAPAAFKYFDTTIDRKRYTSTKEVLDATLIHQSITGLYETRIDLSQLGGDAGDMRAANLWPSPLMIKRSKKNSLALSLTADQMVSALLDAEPPILYSEYDPTRPFSEASMMGLLTNLADRELVHMINWAKRVPGFVDLTLHDQVHLLECAWLEILMIGLVWRSMEHPVKLLFAPNLLLDRNQGKCVEGMVEIFDMLLATSSRFRMMNLQGEEFVCLKSIILLNSGVYTFLSSTLKSLEEKDHIHRVLDKITDTLIHLMAKAGLTLQQQHQRLAQLLLILSHIRHMSNKGMEHLYSMKCKNVVPLYDLLLEAADAHRLHAPTSRGGASVEETDQSHLATAGSTSSHSLQKYYITGEAEGFPATA

SEQ ID NO: 29 - protein, 2024 aa, Artificial sequence
  Cas9 variant 7 linkers
APKKKRKVGIHGVPAATGGGSAGDMRAANLWPSPLMIKRSKKNSLALSLTADQMVSALLDAEPPILYSEYDPTRPFSEASMMGLLTNLADRELVHMINWAKRVPGFVDLTLHDQVHLLECAWLEILMIGLVWRSMEHPVKLLFAPNLLLDRNQGKCVEGMVEIFDMLLATSSRFRMMNLQGEEFVCLKSIILLNSGVYTFLSSTLKSLEEKDHIHRVLDKITDTLIHLMAKAGLTLQQQHQRLAQLLLILSHIRHMSNKGMEHLYSMKCKNVVPLYDLLLEAADAHRLHAPTSRGGASVEETDQSHLATAGSTSSHSLQKYYITGEAEGFPATASGSETPGTGADKKYSIGLDIGTNSVGWAVITDEYKVPSKKFKVLGNTDRHSIKKNLIGALLFDSGETAEATRLKRTARRRYTRRKNRICYLQEIFSNEMAKVDDSFFHRLEESFLVEEDKKHERHPIFGNIVDEVAYHEKYPTIYHLRKKLVDSTDKADLRLIYLALAHMIKFRGHFLIEGDLNPDNSDVDKLFIQLVQTYNQLFEENPINASGVDAKAILSARLSKSRRLENLIAQLPGEKKNGLFGNLIALSLGLTPNFKSNFDLAEDAKLQLSKDTYDDDLDNLLAQIGDQYADLFLAAKNLSDAILLSDILRVNTEITKAPLSASMIKRYDEHHQDLTLLKALVRQQLPEKYKEIFFDQSKNGYAGYIDGGASQEEFYKFIKPILEKMDGTEELLVKLNREDLLRKQRTFDNGSIPHQIHLGELHAILRRQEDFYPFLKDNREKIEKILTFRIPYYVGPLARGNSRFAWMTRKSEETITPWNFEEVVDKGASAQSFIERMTNFDKNLPNEKVLPKHSLLYEYFTVYNELTKVKYVTEGMRKPAFLSGEQKKAIVDLLFKTNRKVTVKQLKEDYFKKIECFDSVEISGVEDRFNASLGTYHDLLKIIKDKDFLDNEENEDILEDIVLTLTLFEDREMIEERLKTYAHLFDDKVMKQLKRRRYTGWGRLSRKLINGIRDKQSGKTILDFLKSDGFANRNFMQLIHDDSLTFKEDIQKAQVSGQGDSLHEHIANLAGSPAIKKGILQTVKVVDELVKVMGRHKPENIVIEMARENQTTQKGQKNSRERMKRIEEGIKELGSQILKEHPVENTQLQNEKLYLYYLQNGRDMYVDQELDINRLSDYDVDHIVPQSFLKDDSIDNKVLTRSDKNRGKSDNVPSEEVVKKMKNYWRQLLNAKLITQRKFDNLTKAERGGLSELDKAGFIKRQLVETRQITKHVAQILDSRMNTKYDENDKLIREVKVITLKSKLVSDFRKDFQFYKVREINNYHHAHDAYLNAVVGTALIKKYPKLESEFVYGDYKVYDVRKMIAKSEQEIGKATAKYFFYSNIMNFFKTEITLANGEIRKRPLIETNGETGEIVWDKGRDFATVRKVLSMPQVNIVKKTEVQTGGFSKESILPKRNSDKLIARKKDWDPKKYGGFDSPTVAYSVLVVAKVEKGKSKKLKSVKELLGITIMERSSFEKNPIDFLEAKGYKEVKKDLIIKLPKYSLFELENGRKRMLASAGELQKGNELALPSKYVNFLYLASHYEKLKGSPEDNEQKQLFVEQHKHYLDEIIEQISEFSKRVILADANLDKVLSAYNKHRDKPIREQAENIIHLFTLTNLGAPAAFKYFDTTIDRKRYTSTKEVLDATLIHQSITGLYETRIDLSQLGGDAGDMRAANLWPSPLMIKRSKKNSLALSLTADQMVSALLDAEPPILYSEYDPTRPFSEASMMGLLTNLADRELVHMINWAKRVPGFVDLTLHDQVHLLECAWLEILMIGLVWRSMEHPVKLLFAPNLLLDRNQGKCVEGMVEIFDMLLATSSRFRMMNLQGEEFVCLKSIILLNSGVYTFLSSTLKSLEEKDHIHRVLDKITDTLIHLMAKAGLTLQQQHQRLAQLLLILSHIRHMSNKGMEHLYSMKCKNVVPLYDLLLEAADAHRLHAPTSRGGASVEETDQSHLATAGSTSSHSLQKYYITGEAEGFPATA

SEQ ID NO: 30 - protein, 2026 aa, Artificial sequence
  Cas9 variant 12 linkers
APKKKRKVGIHGVPAATGGGSAGDMRAANLWPSPLMIKRSKKNSLALSLTADQMVSALLDAEPPILYSEYDPTRPFSEASMMGLLTNLADRELVHMINWAKRVPGFVDLTLHDQVHLLECAWLEILMIGLVWRSMEHPVKLLFAPNLLLDRNQGKCVEGMVEIFDMLLATSSRFRMMNLQGEEFVCLKSIILLNSGVYTFLSSTLKSLEEKDHIHRVLDKITDTLIHLMAKAGLTLQQQHQRLAQLLLILSHIRHMSNKGMEHLYSMKCKNVVPLYDLLLEAADAHRLHAPTSRGGASVEETDQSHLATAGSTSSHSLQKYYITGEAEGFPATASGSETPGTSEGADKKYSIGLDIGTNSVGWAVITDEYKVPSKKFKVLGNTDRHSIKKNLIGALLFDSGETAEATRLKRTARRRYTRRKNRICYLQEIFSNEMAKVDDSFFHRLEESFLVEEDKKHERHPIFGNIVDEVAYHEKYPTIYHLRKKLVDSTDKADLRLIYLALAHMIKFRGHFLIEGDLNPDNSDVDKLFIQLVQTYNQLFEENPINASGVDAKAILSARLSKSRRLENLIAQLPGEKKNGLFGNLIALSLGLTPNFKSNFDLAEDAKLQLSKDTYDDDLDNLLAQIGDQYADLFLAAKNLSDAILLSDILRVNTEITKAPLSASMIKRYDEHHQDLTLLKALVRQQLPEKYKEIFFDQSKNGYAGYIDGGASQEEFYKFIKPILEKMDGTEELLVKLNREDLLRKQRTFDNGSIPHQIHLGELHAILRRQEDFYPFLKDNREKIEKILTFRIPYYVGPLARGNSRFAWMTRKSEETITPWNFEEVVDKGASAQSFIERMTNFDKNLPNEKVLPKHSLLYEYFTVYNELTKVKYVTEGMRKPAFLSGEQKKAIVDLLFKTNRKVTVKQLKEDYFKKIECFDSVEISGVEDRFNASLGTYHDLLKIIKDKDFLDNEENEDILEDIVLTLTLFEDREMIEERLKTYAHLFDDKVMKQLKRRRYTGWGRLSRKLINGIRDKQSGKTILDFLKSDGFANRNFMQLIHDDSLTFKEDIQKAQVSGQGDSLHEHIANLAGSPAIKKGILQTVKVVDELVKVMGRHKPENIVIEMARENQTTQKGQKNSRERMKRIEEGIKELGSQILKEHPVENTQLQNEKLYLYYLQNGRDMYVDQELDINRLSDYDVDHIVPQSFLKDDSIDNKVLTRSDKNRGKSDNVPSEEVVKKMKNYWRQLLNAKLITQRKFDNLTKAERGGLSELDKAGFIKRQLVETRQITKHVAQILDSRMNTKYDENDKLIREVKVITLKSKLVSDFRKDFQFYKVREINNYHHAHDAYLNAVVGTALIKKYPKLESEFVYGDYKVYDVRKMIAKSEQEIGKATAKYFFYSNIMNFFKTEITLANGEIRKRPLIETNGETGEIVWDKGRDFATVRKVLSMPQVNIVKKTEVQTGGFSKESILPKRNSDKLIARKKDWDPKKYGGFDSPTVAYSVLVVAKVEKGKSKKLKSVKELLGITIMERSSFEKNPIDFLEAKGYKEVKKDLIIKLPKYSLFELENGRKRMLASAGELQKGNELALPSKYVNFLYLASHYEKLKGSPEDNEQKQLFVEQHKHYLDEIIEQISEFSKRVILADANLDKVLSAYNKHRDKPIREQAENIIHLFTLTNLGAPAAFKYFDTTIDRKRYTSTKEVLDATLIHQSITGLYETRIDLSQLGGDAGDMRAANLWPSPLMIKRSKKNSLALSLTADQMVSALLDAEPPILYSEYDPTRPFSEASMMGLLTNLADRELVHMINWAKRVPGFVDLTLHDQVHLLECAWLEILMIGLVWRSMEHPVKLLFAPNLLLDRNQGKCVEGMVEIFDMLLATSSRFRMMNLQGEEFVCLKSIILLNSGVYTFLSSTLKSLEEKDHIHRVLDKITDTLIHLMAKAGLTLQQQHQRLAQLLLILSHIRHMSNKGMEHLYSMKCKNVVPLYDLLLEAADAHRLHAPTSRGGASVEETDQSHLATAGSTSSHSLQKYYITGEAEGFPATA

SEQ ID NO: 31 - protein, 2338 aa, Artificial sequence
  Cas9 variant 22 linkers
APKKKRKVGIHGVPAATGGGSAGDMRAANLWPSPLMIKRSKKNSLALSLTADQMVSALLDAEPPILYSEYDPTRPFSEASMMGLLTNLADRELVHMINWAKRVPGFVDLTLHDQVHLLECAWLEILMIGLVWRSMEHPVKLLFAPNLLLDRNQGKCVEGMVEIFDMLLATSSRFRMMNLQGEEFVCLKSIILLNSGVYTFLSSTLKSLEEKDHIHRVLDKITDTLIHLMAKAGLTLQQQHQRLAQLLLILSHIRHMSNKGMEHLYSMKCKNVVPLYDLLLEAADAHRLHAPTSRGGASVEETDQSHLATAGSTSSHSLQKYYITGEAEGFPATAPRGGSAGDMRAANLWPSPLMIKRSKKNSLALSLTADQMVSALLDAEPPILYSEYDPTRPFSEASMMGLLTNLADRELVHMINWAKRVPGFVDLTLHDQVHLLECAWLEILMIGLVWRSMEHPVKLLFAPNLLLDRNQGKCVEGMVEIFDMLLATSSRFRMMNLQGEEFVCLKSIILLNSGVYTFLSSTLKSLEEKDHIHRVLDKITDTLIHLMAKAGLTLQQQHQRLAQLLLILSHIRHMSNKGMEHLYSMKCKNVVPLYDLLLEAADAHRLHAPTSRGGASVEETDQSHLATAGSTSSHSLQKYYITGEAEGFPATATPESGADKKYSIGLDIGTNSVGWAVITDEYKVPSKKFKVLGNTDRHSIKKNLIGALLFDSGETAEATRLKRTARRRYTRRKNRICYLQEIFSNEMAKVDDSFFHRLEESFLVEEDKKHERHPIFGNIVDEVAYHEKYPTIYHLRKKLVDSTDKADLRLIYLALAHMIKFRGHFLIEGDLNPDNSDVDKLFIQLVQTYNQLFEENPINASGVDAKAILSARLSKSRRLENLIAQLPGEKKNGLFGNLIALSLGLTPNFKSNFDLAEDAKLQLSKDTYDDDLDNLLAQIGDQYADLFLAAKNLSDAILLSDILRVNTEITKAPLSASMIKRYDEHHQDLTLLKALVRQQLPEKYKEIFFDQSKNGYAGYIDGGASQEEFYKFIKPILEKMDGTEELLVKLNREDLLRKQRTFDNGSIPHQIHLGELHAILRRQEDFYPFLKDNREKIEKILTFRIPYYVGPLARGNSRFAWMTRKSEETITPWNFEEVVDKGASAQSFIERMTNFDKNLPNEKVLPKHSLLYEYFTVYNELTKVKYVTEGMRKPAFLSGEQKKAIVDLLFKTNRKVTVKQLKEDYFKKIECFDSVEISGVEDRFNASLGTYHDLLKIIKDKDFLDNEENEDILEDIVLTLTLFEDREMIEERLKTYAHLFDDKVMKQLKRRRYTGWGRLSRKLINGIRDKQSGKTILDFLKSDGFANRNFMQLIHDDSLTFKEDIQKAQVSGQGDSLHEHIANLAGSPAIKKGILQTVKVVDELVKVMGRHKPENIVIEMARENQTTQKGQKNSRERMKRIEEGIKELGSQILKEHPVENTQLQNEKLYLYYLQNGRDMYVDQELDINRLSDYDVDHIVPQSFLKDDSIDNKVLTRSDKNRGKSDNVPSEEVVKKMKNYWRQLLNAKLITQRKFDNLTKAERGGLSELDKAGFIKRQLVETRQITKHVAQILDSRMNTKYDENDKLIREVKVITLKSKLVSDFRKDFQFYKVREINNYHHAHDAYLNAVVGTALIKKYPKLESEFVYGDYKVYDVRKMIAKSEQEIGKATAKYFFYSNIMNFFKTEITLANGEIRKRPLIETNGETGEIVWDKGRDFATVRKVLSMPQVNIVKKTEVQTGGFSKESILPKRNSDKLIARKKDWDPKKYGGFDSPTVAYSVLVVAKVEKGKSKKLKSVKELLGITIMERSSFEKNPIDFLEAKGYKEVKKDLIIKLPKYSLFELENGRKRMLASAGELQKGNELALPSKYVNFLYLASHYEKLKGSPEDNEQKQLFVEQHKHYLDEIIEQISEFSKRVILADANLDKVLSAYNKHRDKPIREQAENIIHLFTLTNLGAPAAFKYFDTTIDRKRYTSTKEVLDATLIHQSITGLYETRIDLSQLGGDAGDMRAANLWPSPLMIKRSKKNSLALSLTADQMVSALLDAEPPILYSEYDPTRPFSEASMMGLLTNLADRELVHMINWAKRVPGFVDLTLHDQVHLLECAWLEILMIGLVWRSMEHPVKLLFAPNLLLDRNQGKCVEGMVEIFDMLLATSSRFRMMNLQGEEFVCLKSIILLNSGVYTFLSSTLKSLEEKDHIHRVLDKITDTLIHLMAKAGLTLQQQHQRLAQLLLILSHIRHMSNKGMEHLYSMKCKNVVPLYDLLLEAADAHRLHAPTSRGGASVEETDQSHLATAGSTSSHSLQKYYITGEAEGFPATA

SEQ ID NO: 32 - protein, 2341 aa, Artificial sequence
  Cas9 variant 21 linkers
APKKKRKVGIHGVPAATGGGSAGDMRAANLWPSPLMIKRSKKNSLALSLTADQMVSALLDAEPPILYSEYDPTRPFSEASMMGLLTNLADRELVHMINWAKRVPGFVDLTLHDQVHLLECAWLEILMIGLVWRSMEHPVKLLFAPNLLLDRNQGKCVEGMVEIFDMLLATSSRFRMMNLQGEEFVCLKSIILLNSGVYTFLSSTLKSLEEKDHIHRVLDKITDTLIHLMAKAGLTLQQQHQRLAQLLLILSHIRHMSNKGMEHLYSMKCKNVVPLYDLLLEAADAHRLHAPTSRGGASVEETDQSHLATAGSTSSHSLQKYYITGEAEGFPATAGGSPRGGSAGDMRAANLWPSPLMIKRSKKNSLALSLTADQMVSALLDAEPPILYSEYDPTRPFSEASMMGLLTNLADRELVHMINWAKRVPGFVDLTLHDQVHLLECAWLEILMIGLVWRSMEHPVKLLFAPNLLLDRNQGKCVEGMVEIFDMLLATSSRFRMMNLQGEEFVCLKSIILLNSGVYTFLSSTLKSLEEKDHIHRVLDKITDTLIHLMAKAGLTLQQQHQRLAQLLLILSHIRHMSNKGMEHLYSMKCKNVVPLYDLLLEAADAHRLHAPTSRGGASVEETDQSHLATAGSTSSHSLQKYYITGEAEGFPATATPESGADKKYSIGLDIGTNSVGWAVITDEYKVPSKKFKVLGNTDRHSIKKNLIGALLFDSGETAEATRLKRTARRRYTRRKNRICYLQEIFSNEMAKVDDSFFHRLEESFLVEEDKKHERHPIFGNIVDEVAYHEKYPTIYHLRKKLVDSTDKADLRLIYLALAHMIKFRGHFLIEGDLNPDNSDVDKLFIQLVQTYNQLFEENPINASGVDAKAILSARLSKSRRLENLIAQLPGEKKNGLFGNLIALSLGLTPNFKSNFDLAEDAKLQLSKDTYDDDLDNLLAQIGDQYADLFLAAKNLSDAILLSDILRVNTEITKAPLSASMIKRYDEHHQDLTLLKALVRQQLPEKYKEIFFDQSKNGYAGYIDGGASQEEFYKFIKPILEKMDGTEELLVKLNREDLLRKQRTFDNGSIPHQIHLGELHAILRRQEDFYPFLKDNREKIEKILTFRIPYYVGPLARGNSRFAWMTRKSEETITPWNFEEVVDKGASAQSFIERMTNFDKNLPNEKVLPKHSLLYEYFTVYNELTKVKYVTEGMRKPAFLSGEQKKAIVDLLFKTNRKVTVKQLKEDYFKKIECFDSVEISGVEDRFNASLGTYHDLLKIIKDKDFLDNEENEDILEDIVLTLTLFEDREMIEERLKTYAHLFDDKVMKQLKRRRYTGWGRLSRKLINGIRDKQSGKTILDFLKSDGFANRNFMQLIHDDSLTFKEDIQKAQVSGQGDSLHEHIANLAGSPAIKKGILQTVKVVDELVKVMGRHKPENIVIEMARENQTTQKGQKNSRERMKRIEEGIKELGSQILKEHPVENTQLQNEKLYLYYLQNGRDMYVDQELDINRLSDYDVDHIVPQSFLKDDSIDNKVLTRSDKNRGKSDNVPSEEVVKKMKNYWRQLLNAKLITQRKFDNLTKAERGGLSELDKAGFIKRQLVETRQITKHVAQILDSRMNTKYDENDKLIREVKVITLKSKLVSDFRKDFQFYKVREINNYHHAHDAYLNAVVGTALIKKYPKLESEFVYGDYKVYDVRKMIAKSEQEIGKATAKYFFYSNIMNFFKTEITLANGEIRKRPLIETNGETGEIVWDKGRDFATVRKVLSMPQVNIVKKTEVQTGGFSKESILPKRNSDKLIARKKDWDPKKYGGFDSPTVAYSVLVVAKVEKGKSKKLKSVKELLGITIMERSSFEKNPIDFLEAKGYKEVKKDLIIKLPKYSLFELENGRKRMLASAGELQKGNELALPSKYVNFLYLASHYEKLKGSPEDNEQKQLFVEQHKHYLDEIIEQISEFSKRVILADANLDKVLSAYNKHRDKPIREQAENIIHLFTLTNLGAPAAFKYFDTTIDRKRYTSTKEVLDATLIHQSITGLYETRIDLSQLGGDAGDMRAANLWPSPLMIKRSKKNSLALSLTADQMVSALLDAEPPILYSEYDPTRPFSEASMMGLLTNLADRELVHMINWAKRVPGFVDLTLHDQVHLLECAWLEILMIGLVWRSMEHPVKLLFAPNLLLDRNQGKCVEGMVEIFDMLLATSSRFRMMNLQGEEFVCLKSIILLNSGVYTFLSSTLKSLEEKDHIHRVLDKITDTLIHLMAKAGLTLQQQHQRLAQLLLILSHIRHMSNKGMEHLYSMKCKNVVPLYDLLLEAADAHRLHAPTSRGGASVEETDQSHLATAGSTSSHSLQKYYITGEAEGFPATA

SEQ ID NO: 33 - protein, 2329 aa, Artificial sequence
  Cas9 variant 23 linkers
APKKKRKVGIHGVPAATGAGDMRAANLWPSPLMIKRSKKNSLALSLTADQMVSALLDAEPPILYSEYDPTRPFSEASMMGLLTNLADRELVHMINWAKRVPGFVDLTLHDQVHLLECAWLEILMIGLVWRSMEHPVKLLFAPNLLLDRNQGKCVEGMVEIFDMLLATSSRFRMMNLQGEEFVCLKSIILLNSGVYTFLSSTLKSLEEKDHIHRVLDKITDTLIHLMAKAGLTLQQQHQRLAQLLLILSHIRHMSNKGMEHLYSMKCKNVVPLYDLLLEAADAHRLHAPTSRGGASVEETDQSHLATAGSTSSHSLQKYYITGEAEGFPATAGADKKYSIGLDIGTNSVGWAVITDEYKVPSKKFKVLGNTDRHSIKKNLIGALLFDSGETAEATRLKRTARRRYTRRKNRICYLQEIFSNEMAKVDDSFFHRLEESFLVEEDKKHERHPIFGNIVDEVAYHEKYPTIYHLRKKLVDSTDKADLRLIYLALAHMIKFRGHFLIEGDLNPDNSDVDKLFIQLVQTYNQLFEENPINASGVDAKAILSARLSKSRRLENLIAQLPGEKKNGLFGNLIALSLGLTPNFKSNFDLAEDAKLQLSKDTYDDDLDNLLAQIGDQYADLFLAAKNLSDAILLSDILRVNTEITKAPLSASMIKRYDEHHQDLTLLKALVRQQLPEKYKEIFFDQSKNGYAGYIDGGASQEEFYKFIKPILEKMDGTEELLVKLNREDLLRKQRTFDNGSIPHQIHLGELHAILRRQEDFYPFLKDNREKIEKILTFRIPYYVGPLARGNSRFAWMTRKSEETITPWNFEEVVDKGASAQSFIERMTNFDKNLPNEKVLPKHSLLYEYFTVYNELTKVKYVTEGMRKPAFLSGEQKKAIVDLLFKTNRKVTVKQLKEDYFKKIECFDSVEISGVEDRFNASLGTYHDLLKIIKDKDFLDNEENEDILEDIVLTLTLFEDREMIEERLKTYAHLFDDKVMKQLKRRRYTGWGRLSRKLINGIRDKQSGKTILDFLKSDGFANRNFMQLIHDDSLTFKEDIQKAQVSGQGDSLHEHIANLAGSPAIKKGILQTVKVVDELVKVMGRHKPENIVIEMARENQTTQKGQKNSRERMKRIEEGIKELGSQILKEHPVENTQLQNEKLYLYYLQNGRDMYVDQELDINRLSDYDVDHIVPQSFLKDDSIDNKVLTRSDKNRGKSDNVPSEEVVKKMKNYWRQLLNAKLITQRKFDNLTKAERGGLSELDKAGFIKRQLVETRQITKHVAQILDSRMNTKYDENDKLIREVKVITLKSKLVSDFRKDFQFYKVREINNYHHAHDAYLNAVVGTALIKKYPKLESEFVYGDYKVYDVRKMIAKSEQEIGKATAKYFFYSNIMNFFKTEITLANGEIRKRPLIETNGETGEIVWDKGRDFATVRKVLSMPQVNIVKKTEVQTGGFSKESILPKRNSDKLIARKKDWDPKKYGGFDSPTVAYSVLVVAKVEKGKSKKLKSVKELLGITIMERSSFEKNPIDFLEAKGYKEVKKDLIIKLPKYSLFELENGRKRMLASAGELQKGNELALPSKYVNFLYLASHYEKLKGSPEDNEQKQLFVEQHKHYLDEIIEQISEFSKRVILADANLDKVLSAYNKHRDKPIREQAENIIHLFTLTNLGAPAAFKYFDTTIDRKRYTSTKEVLDATLIHQSITGLYETRIDLSQLGGDAGDMRAANLWPSPLMIKRSKKNSLALSLTADQMVSALLDAEPPILYSEYDPTRPFSEASMMGLLTNLADRELVHMINWAKRVPGFVDLTLHDQVHLLECAWLEILMIGLVWRSMEHPVKLLFAPNLLLDRNQGKCVEGMVEIFDMLLATSSRFRMMNLQGEEFVCLKSIILLNSGVYTFLSSTLKSLEEKDHIHRVLDKITDTLIHLMAKAGLTLQQQHQRLAQLLLILSHIRHMSNKGMEHLYSMKCKNVVPLYDLLLEAADAHRLHAPTSRGGASVEETDQSHLATAGSTSSHSLQKYYITGEAEGFPATAPAGAGDMRAANLWPSPLMIKRSKKNSLALSLTADQMVSALLDAEPPILYSEYDPTRPFSEASMMGLLTNLADRELVHMINWAKRVPGFVDLTLHDQVHLLECAWLEILMIGLVWRSMEHPVKLLFAPNLLLDRNQGKCVEGMVEIFDMLLATSSRFRMMNLQGEEFVCLKSIILLNSGVYTFLSSTLKSLEEKDHIHRVLDKITDTLIHLMAKAGLTLQQQHQRLAQLLLILSHIRHMSNKGMEHLYSMKCKNVVPLYDLLLEAADAHRLHAPTSRGGASVEETDQSHLATAGSTSSHSLQKYYITGEAEGFPATA

SEQ ID NO: 34 - protein, 2332 aa, Artificial sequence
  Cas9 variant 24 linkers
APKKKRKVGIHGVPAATGAGDMRAANLWPSPLMIKRSKKNSLALSLTADQMVSALLDAEPPILYSEYDPTRPFSEASMMGLLTNLADRELVHMINWAKRVPGFVDLTLHDQVHLLECAWLEILMIGLVWRSMEHPVKLLFAPNLLLDRNQGKCVEGMVEIFDMLLATSSRFRMMNLQGEEFVCLKSIILLNSGVYTFLSSTLKSLEEKDHIHRVLDKITDTLIHLMAKAGLTLQQQHQRLAQLLLILSHIRHMSNKGMEHLYSMKCKNVVPLYDLLLEAADAHRLHAPTSRGGASVEETDQSHLATAGSTSSHSLQKYYITGEAEGFPATAGADKKYSIGLDIGTNSVGWAVITDEYKVPSKKFKVLGNTDRHSIKKNLIGALLFDSGETAEATRLKRTARRRYTRRKNRICYLQEIFSNEMAKVDDSFFHRLEESFLVEEDKKHERHPIFGNIVDEVAYHEKYPTIYHLRKKLVDSTDKADLRLIYLALAHMIKFRGHFLIEGDLNPDNSDVDKLFIQLVQTYNQLFEENPINASGVDAKAILSARLSKSRRLENLIAQLPGEKKNGLFGNLIALSLGLTPNFKSNFDLAEDAKLQLSKDTYDDDLDNLLAQIGDQYADLFLAAKNLSDAILLSDILRVNTEITKAPLSASMIKRYDEHHQDLTLLKALVRQQLPEKYKEIFFDQSKNGYAGYIDGGASQEEFYKFIKPILEKMDGTEELLVKLNREDLLRKQRTFDNGSIPHQIHLGELHAILRRQEDFYPFLKDNREKIEKILTFRIPYYVGPLARGNSRFAWMTRKSEETITPWNFEEVVDKGASAQSFIERMTNFDKNLPNEKVLPKHSLLYEYFTVYNELTKVKYVTEGMRKPAFLSGEQKKAIVDLLFKTNRKVTVKQLKEDYFKKIECFDSVEISGVEDRFNASLGTYHDLLKIIKDKDFLDNEENEDILEDIVLTLTLFEDREMIEERLKTYAHLFDDKVMKQLKRRRYTGWGRLSRKLINGIRDKQSGKTILDFLKSDGFANRNFMQLIHDDSLTFKEDIQKAQVSGQGDSLHEHIANLAGSPAIKKGILQTVKVVDELVKVMGRHKPENIVIEMARENQTTQKGQKNSRERMKRIEEGIKELGSQILKEHPVENTQLQNEKLYLYYLQNGRDMYVDQELDINRLSDYDVDHIVPQSFLKDDSIDNKVLTRSDKNRGKSDNVPSEEVVKKMKNYWRQLLNAKLITQRKFDNLTKAERGGLSELDKAGFIKRQLVETRQITKHVAQILDSRMNTKYDENDKLIREVKVITLKSKLVSDFRKDFQFYKVREINNYHHAHDAYLNAVVGTALIKKYPKLESEFVYGDYKVYDVRKMIAKSEQEIGKATAKYFFYSNIMNFFKTEITLANGEIRKRPLIETNGETGEIVWDKGRDFATVRKVLSMPQVNIVKKTEVQTGGFSKESILPKRNSDKLIARKKDWDPKKYGGFDSPTVAYSVLVVAKVEKGKSKKLKSVKELLGITIMERSSFEKNPIDFLEAKGYKEVKKDLIIKLPKYSLFELENGRKRMLASAGELQKGNELALPSKYVNFLYLASHYEKLKGSPEDNEQKQLFVEQHKHYLDEIIEQISEFSKRVILADANLDKVLSAYNKHRDKPIREQAENIIHLFTLTNLGAPAAFKYFDTTIDRKRYTSTKEVLDATLIHQSITGLYETRIDLSQLGGDAGDMRAANLWPSPLMIKRSKKNSLALSLTADQMVSALLDAEPPILYSEYDPTRPFSEASMMGLLTNLADRELVHMINWAKRVPGFVDLTLHDQVHLLECAWLEILMIGLVWRSMEHPVKLLFAPNLLLDRNQGKCVEGMVEIFDMLLATSSRFRMMNLQGEEFVCLKSIILLNSGVYTFLSSTLKSLEEKDHIHRVLDKITDTLIHLMAKAGLTLQQQHQRLAQLLLILSHIRHMSNKGMEHLYSMKCKNVVPLYDLLLEAADAHRLHAPTSRGGASVEETDQSHLATAGSTSSHSLQKYYITGEAEGFPATAPAGGGSAGDMRAANLWPSPLMIKRSKKNSLALSLTADQMVSALLDAEPPILYSEYDPTRPFSEASMMGLLTNLADRELVHMINWAKRVPGFVDLTLHDQVHLLECAWLEILMIGLVWRSMEHPVKLLFAPNLLLDRNQGKCVEGMVEIFDMLLATSSRFRMMNLQGEEFVCLKSIILLNSGVYTFLSSTLKSLEEKDHIHRVLDKITDTLIHLMAKAGLTLQQQHQRLAQLLLILSHIRHMSNKGMEHLYSMKCKNVVPLYDLLLEAADAHRLHAPTSRGGASVEETDQSHLATAGSTSSHSLQKYYITGEAEGFPATA

SEQ ID NO: 35 - protein, 2026 aa, Artificial sequence
  Cas9 variant 8 linkers
APKKKRKVGIHGVPAATGGGSAGDMRAANLWPSPLMIKRSKKNSLALSLTADQMVSALLDAEPPILYSEYDPTRPFSEASMMGLLTNLADRELVHMINWAKRVPGFVDLTLHDQVHLLECAWLEILMIGLVWRSMEHPVKLLFAPNLLLDRNQGKCVEGMVEIFDMLLATSSRFRMMNLQGEEFVCLKSIILLNSGVYTFLSSTLKSLEEKDHIHRVLDKITDTLIHLMAKAGLTLQQQHQRLAQLLLILSHIRHMSNKGMEHLYSMKCKNVVPLYDLLLEAADAHRLHAPTSRGGASVEETDQSHLATAGSTSSHSLQKYYITGEAEGFPATASGSETPGTPGGADKKYSIGLDIGTNSVGWAVITDEYKVPSKKFKVLGNTDRHSIKKNLIGALLFDSGETAEATRLKRTARRRYTRRKNRICYLQEIFSNEMAKVDDSFFHRLEESFLVEEDKKHERHPIFGNIVDEVAYHEKYPTIYHLRKKLVDSTDKADLRLIYLALAHMIKFRGHFLIEGDLNPDNSDVDKLFIQLVQTYNQLFEENPINASGVDAKAILSARLSKSRRLENLIAQLPGEKKNGLFGNLIALSLGLTPNFKSNFDLAEDAKLQLSKDTYDDDLDNLLAQIGDQYADLFLAAKNLSDAILLSDILRVNTEITKAPLSASMIKRYDEHHQDLTLLKALVRQQLPEKYKEIFFDQSKNGYAGYIDGGASQEEFYKFIKPILEKMDGTEELLVKLNREDLLRKQRTFDNGSIPHQIHLGELHAILRRQEDFYPFLKDNREKIEKILTFRIPYYVGPLARGNSRFAWMTRKSEETITPWNFEEVVDKGASAQSFIERMTNFDKNLPNEKVLPKHSLLYEYFTVYNELTKVKYVTEGMRKPAFLSGEQKKAIVDLLFKTNRKVTVKQLKEDYFKKIECFDSVEISGVEDRFNASLGTYHDLLKIIKDKDFLDNEENEDILEDIVLTLTLFEDREMIEERLKTYAHLFDDKVMKQLKRRRYTGWGRLSRKLINGIRDKQSGKTILDFLKSDGFANRNFMQLIHDDSLTFKEDIQKAQVSGQGDSLHEHIANLAGSPAIKKGILQTVKVVDELVKVMGRHKPENIVIEMARENQTTQKGQKNSRERMKRIEEGIKELGSQILKEHPVENTQLQNEKLYLYYLQNGRDMYVDQELDINRLSDYDVDHIVPQSFLKDDSIDNKVLTRSDKNRGKSDNVPSEEVVKKMKNYWRQLLNAKLITQRKFDNLTKAERGGLSELDKAGFIKRQLVETRQITKHVAQILDSRMNTKYDENDKLIREVKVITLKSKLVSDFRKDFQFYKVREINNYHHAHDAYLNAVVGTALIKKYPKLESEFVYGDYKVYDVRKMIAKSEQEIGKATAKYFFYSNIMNFFKTEITLANGEIRKRPLIETNGETGEIVWDKGRDFATVRKVLSMPQVNIVKKTEVQTGGFSKESILPKRNSDKLIARKKDWDPKKYGGFDSPTVAYSVLVVAKVEKGKSKKLKSVKELLGITIMERSSFEKNPIDFLEAKGYKEVKKDLIIKLPKYSLFELENGRKRMLASAGELQKGNELALPSKYVNFLYLASHYEKLKGSPEDNEQKQLFVEQHKHYLDEIIEQISEFSKRVILADANLDKVLSAYNKHRDKPIREQAENIIHLFTLTNLGAPAAFKYFDTTIDRKRYTSTKEVLDATLIHQSITGLYETRIDLSQLGGDAGDMRAANLWPSPLMIKRSKKNSLALSLTADQMVSALLDAEPPILYSEYDPTRPFSEASMMGLLTNLADRELVHMINWAKRVPGFVDLTLHDQVHLLECAWLEILMIGLVWRSMEHPVKLLFAPNLLLDRNQGKCVEGMVEIFDMLLATSSRFRMMNLQGEEFVCLKSIILLNSGVYTFLSSTLKSLEEKDHIHRVLDKITDTLIHLMAKAGLTLQQQHQRLAQLLLILSHIRHMSNKGMEHLYSMKCKNVVPLYDLLLEAADAHRLHAPTSRGGASVEETDQSHLATAGSTSSHSLQKYYITGEAEGFPATA

SEQ ID NO: 36 - protein, 2654 aa, Artificial sequence
  Cas9 variant 27 linkers
APKKKRKVGIHGVPAATGGGSAGDMRAANLWPSPLMIKRSKKNSLALSLTADQMVSALLDAEPPILYSEYDPTRPFSEASMMGLLTNLADRELVHMINWAKRVPGFVDLTLHDQVHLLECAWLEILMIGLVWRSMEHPVKLLFAPNLLLDRNQGKCVEGMVEIFDMLLATSSRFRMMNLQGEEFVCLKSIILLNSGVYTFLSSTLKSLEEKDHIHRVLDKITDTLIHLMAKAGLTLQQQHQRLAQLLLILSHIRHMSNKGMEHLYSMKCKNVVPLYDLLLEAADAHRLHAPTSRGGASVEETDQSHLATAGSTSSHSLQKYYITGEAEGFPATAPRGGSAGDMRAANLWPSPLMIKRSKKNSLALSLTADQMVSALLDAEPPILYSEYDPTRPFSEASMMGLLTNLADRELVHMINWAKRVPGFVDLTLHDQVHLLECAWLEILMIGLVWRSMEHPVKLLFAPNLLLDRNQGKCVEGMVEIFDMLLATSSRFRMMNLQGEEFVCLKSIILLNSGVYTFLSSTLKSLEEKDHIHRVLDKITDTLIHLMAKAGLTLQQQHQRLAQLLLILSHIRHMSNKGMEHLYSMKCKNVVPLYDLLLEAADAHRLHAPTSRGGASVEETDQSHLATAGSTSSHSLQKYYITGEAEGFPATATPESGADKKYSIGLDIGTNSVGWAVITDEYKVPSKKFKVLGNTDRHSIKKNLIGALLFDSGETAEATRLKRTARRRYTRRKNRICYLQEIFSNEMAKVDDSFFHRLEESFLVEEDKKHERHPIFGNIVDEVAYHEKYPTIYHLRKKLVDSTDKADLRLIYLALAHMIKFRGHFLIEGDLNPDNSDVDKLFIQLVQTYNQLFEENPINASGVDAKAILSARLSKSRRLENLIAQLPGEKKNGLFGNLIALSLGLTPNFKSNFDLAEDAKLQLSKDTYDDDLDNLLAQIGDQYADLFLAAKNLSDAILLSDILRVNTEITKAPLSASMIKRYDEHHQDLTLLKALVRQQLPEKYKEIFFDQSKNGYAGYIDGGASQEEFYKFIKPILEKMDGTEELLVKLNREDLLRKQRTFDNGSIPHQIHLGELHAILRRQEDFYPFLKDNREKIEKILTFRIPYYVGPLARGNSRFAWMTRKSEETITPWNFEEVVDKGASAQSFIERMTNFDKNLPNEKVLPKHSLLYEYFTVYNELTKVKYVTEGMRKPAFLSGEQKKAIVDLLFKTNRKVTVKQLKEDYFKKIECFDSVEISGVEDRFNASLGTYHDLLKIIKDKDFLDNEENEDILEDIVLTLTLFEDREMIEERLKTYAHLFDDKVMKQLKRRRYTGWGRLSRKLINGIRDKQSGKTILDFLKSDGFANRNFMQLIHDDSLTFKEDIQKAQVSGQGDSLHEHIANLAGSPAIKKGILQTVKVVDELVKVMGRHKPENIVIEMARENQTTQKGQKNSRERMKRIEEGIKELGSQILKEHPVENTQLQNEKLYLYYLQNGRDMYVDQELDINRLSDYDVDHIVPQSFLKDDSIDNKVLTRSDKNRGKSDNVPSEEVVKKMKNYWRQLLNAKLITQRKFDNLTKAERGGLSELDKAGFIKRQLVETRQITKHVAQILDSRMNTKYDENDKLIREVKVITLKSKLVSDFRKDFQFYKVREINNYHHAHDAYLNAVVGTALIKKYPKLESEFVYGDYKVYDVRKMIAKSEQEIGKATAKYFFYSNIMNFFKTEITLANGEIRKRPLIETNGETGEIVWDKGRDFATVRKVLSMPQVNIVKKTEVQTGGFSKESILPKRNSDKLIARKKDWDPKKYGGFDSPTVAYSVLVVAKVEKGKSKKLKSVKELLGITIMERSSFEKNPIDFLEAKGYKEVKKDLIIKLPKYSLFELENGRKRMLASAGELQKGNELALPSKYVNFLYLASHYEKLKGSPEDNEQKQLFVEQHKHYLDEIIEQISEFSKRVILADANLDKVLSAYNKHRDKPIREQAENIIHLFTLTNLGAPAAFKYFDTTIDRKRYTSTKEVLDATLIHQSITGLYETRIDLSQLGGDAGDMRAANLWPSPLMIKRSKKNSLALSLTADQMVSALLDAEPPILYSEYDPTRPFSEASMMGLLTNLADRELVHMINWAKRVPGFVDLTLHDQVHLLECAWLEILMIGLVWRSMEHPVKLLFAPNLLLDRNQGKCVEGMVEIFDMLLATSSRFRMMNLQGEEFVCLKSIILLNSGVYTFLSSTLKSLEEKDHIHRVLDKITDTLIHLMAKAGLTLQQQHQRLAQLLLILSHIRHMSNKGMEHLYSMKCKNVVPLYDLLLEAADAHRLHAPTSRGGASVEETDQSHLATAGSTSSHSLQKYYITGEAEGFPATAPAGAGDMRAANLWPSPLMIKRSKKNSLALSLTADQMVSALLDAEPPILYSEYDPTRPFSEASMMGLLTNLADRELVHMINWAKRVPGFVDLTLHDQVHLLECAWLEILMIGLVWRSMEHPVKLLFAPNLLLDRNQGKCVEGMVEIFDMLLATSSRFRMMNLQGEEFVCLKSIILLNSGVYTFLSSTLKSLEEKDHIHRVLDKITDTLIHLMAKAGLTLQQQHQRLAQLLLILSHIRHMSNKGMEHLYSMKCKNVVPLYDLLLEAADAHRLHAPTSRGGASVEETDQSHLATAGSTSSHSLQKYYITGEAEGFPATA

SEQ ID NO: 37 - protein, 2654 aa, Artificial sequence
  Cas9 variant 30 linkers (iCas)
  misc_feature (2022)..(2022): Xaa can be any naturally occurring amino acid
APKKKRKVGIHGVPAATGGGSAGDMRAANLWPSPLMIKRSKKNSLALSLTADQMVSALLDAEPPILYSEYDPTRPFSEASMMGLLTNLADRELVHMINWAKRVPGFVDLTLHDQVHLLECAWLEILMIGLVWRSMEHPVKLLFAPNLLLDRNQGKCVEGMVEIFDMLLATSSRFRMMNLQGEEFVCLKSIILLNSGVYTFLSSTLKSLEEKDHIHRVLDKITDTLIHLMAKAGLTLQQQHQRLAQLLLILSHIRHMSNKGMEHLYSMKCKNVVPLYDLLLEAADAHRLHAPTSRGGASVEETDQSHLATAGSTSSHSLQKYYITGEAEGFPATAPRAGDMRAANLWPSPLMIKRSKKNSLALSLTADQMVSALLDAEPPILYSEYDPTRPFSEASMMGLLTNLADRELVHMINWAKRVPGFVDLTLHDQVHLLECAWLEILMIGLVWRSMEHPVKLLFAPNLLLDRNQGKCVEGMVEIFDMLLATSSRFRMMNLQGEEFVCLKSIILLNSGVYTFLSSTLKSLEEKDHIHRVLDKITDTLIHLMAKAGLTLQQQHQRLAQLLLILSHIRHMSNKGMEHLYSMKCKNVVPLYDLLLEAADAHRLHAPTSRGGASVEETDQSHLATAGSTSSHSLQKYYITGEAEGFPATATPESGDKKYSIGLDIGTNSVGWAVITDEYKVPSKKFKVLGNTDRHSIKKNLIGALLFDSGETAEATRLKRTARRRYTRRKNRICYLQEIFSNEMAKVDDSFFHRLEESFLVEEDKKHERHPIFGNIVDEVAYHEKYPTIYHLRKKLVDSTDKADLRLIYLALAHMIKFRGHFLIEGDLNPDNSDVDKLFIQLVQTYNQLFEENPINASGVDAKAILSARLSKSRRLENLIAQLPGEKKNGLFGNLIALSLGLTPNFKSNFDLAEDAKLQLSKDTYDDDLDNLLAQIGDQYADLFLAAKNLSDAILLSDILRVNTEITKAPLSASMIKRYDEHHQDLTLLKALVRQQLPEKYKEIFFDQSKNGYAGYIDGGASQEEFYKFIKPILEKMDGTEELLVKLNREDLLRKQRTFDNGSIPHQIHLGELHAILRRQEDFYPFLKDNREKIEKILTFRIPYYVGPLARGNSRFAWMTRKSEETITPWNFEEVVDKGASAQSFIERMTNFDKNLPNEKVLPKHSLLYEYFTVYNELTKVKYVTEGMRKPAFLSGEQKKAIVDLLFKTNRKVTVKQLKEDYFKKIECFDSVEISGVEDRFNASLGTYHDLLKIIKDKDFLDNEENEDILEDIVLTLTLFEDREMIEERLKTYAHLFDDKVMKQLKRRRYTGWGRLSRKLINGIRDKQSGKTILDFLKSDGFANRNFMQLIHDDSLTFKEDIQKAQVSGQGDSLHEHIANLAGSPAIKKGILQTVKVVDELVKVMGRHKPENIVIEMARENQTTQKGQKNSRERMKRIEEGIKELGSQILKEHPVENTQLQNEKLYLYYLQNGRDMYVDQELDINRLSDYDVDHIVPQSFLKDDSIDNKVLTRSDKNRGKSDNVPSEEVVKKMKNYWRQLLNAKLITQRKFDNLTKAERGGLSELDKAGFIKRQLVETRQITKHVAQILDSRMNTKYDENDKLIREVKVITLKSKLVSDFRKDFQFYKVREINNYHHAHDAYLNAVVGTALIKKYPKLESEFVYGDYKVYDVRKMIAKSEQEIGKATAKYFFYSNIMNFFKTEITLANGEIRKRPLIETNGETGEIVWDKGRDFATVRKVLSMPQVNIVKKTEVQTGGFSKESILPKRNSDKLIARKKDWDPKKYGGFDSPTVAYSVLVVAKVEKGKSKKLKSVKELLGITIMERSSFEKNPIDFLEAKGYKEVKKDLIIKLPKYSLFELENGRKRMLASAGELQKGNELALPSKYVNFLYLASHYEKLKGSPEDNEQKQLFVEQHKHYLDEIIEQISEFSKRVILADANLDKVLSAYNKHRDKPIREQAENIIHLFTLTNLGAPAAFKYFDTTIDRKRYTSTKEVLDATLIHQSITGLYETRIDLSQLGGDXAGDMRAANLWPSPLMIKRSKKNSLALSLTADQMVSALLDAEPPILYSEYDPTRPFSEASMMGLLTNLADRELVHMINWAKRVPGFVDLTLHDQVHLLECAWLEILMIGLVWRSMEHPVKLLFAPNLLLDRNQGKCVEGMVEIFDMLLATSSRFRMMNLQGEEFVCLKSIILLNSGVYTFLSSTLKSLEEKDHIHRVLDKITDTLIHLMAKAGLTLQQQHQRLAQLLLILSHIRHMSNKGMEHLYSMKCKNVVPLYDLLLEAADAHRLHAPTSRGGASVEETDQSHLATAGSTSSHSLQKYYITGEAEGFPATAPAGGGSAGDMRAANLWPSPLMIKRSKKNSLALSLTADQMVSALLDAEPPILYSEYDPTRPFSEASMMGLLTNLADRELVHMINWAKRVPGFVDLTLHDQVHLLECAWLEILMIGLVWRSMEHPVKLLFAPNLLLDRNQGKCVEGMVEIFDMLLATSSRFRMMNLQGEEFVCLKSIILLNSGVYTFLSSTLKSLEEKDHIHRVLDKITDTLIHLMAKAGLTLQQQHQRLAQLLLILSHIRHMSNKGMEHLYSMKCKNVVPLYDLLLEAADAHRLHAPTSRGGASVEETDQSHLATAGSTSSHSLQKYYITGEAEGFPATA

SEQ ID NO: 38 - protein, 2657 aa, Artificial sequence
  Cas9 variant 25 linkers
APKKKRKVGIHGVPAATGAGDMRAANLWPSPLMIKRSKKNSLALSLTADQMVSALLDAEPPILYSEYDPTRPFSEASMMGLLTNLADRELVHMINWAKRVPGFVDLTLHDQVHLLECAWLEILMIGLVWRSMEHPVKLLFAPNLLLDRNQGKCVEGMVEIFDMLLATSSRFRMMNLQGEEFVCLKSIILLNSGVYTFLSSTLKSLEEKDHIHRVLDKITDTLIHLMAKAGLTLQQQHQRLAQLLLILSHIRHMSNKGMEHLYSMKCKNVVPLYDLLLEAADAHRLHAPTSRGGASVEETDQSHLATAGSTSSHSLQKYYITGEAEGFPATAGGSPRGGSAGDMRAANLWPSPLMIKRSKKNSLALSLTADQMVSALLDAEPPILYSEYDPTRPFSEASMMGLLTNLADRELVHMINWAKRVPGFVDLTLHDQVHLLECAWLEILMIGLVWRSMEHPVKLLFAPNLLLDRNQGKCVEGMVEIFDMLLATSSRFRMMNLQGEEFVCLKSIILLNSGVYTFLSSTLKSLEEKDHIHRVLDKITDTLIHLMAKAGLTLQQQHQRLAQLLLILSHIRHMSNKGMEHLYSMKCKNVVPLYDLLLEAADAHRLHAPTSRGGASVEETDQSHLATAGSTSSHSLQKYYITGEAEGFPATATPESGADKKYSIGLDIGTNSVGWAVITDEYKVPSKKFKVLGNTDRHSIKKNLIGALLFDSGETAEATRLKRTARRRYTRRKNRICYLQEIFSNEMAKVDDSFFHRLEESFLVEEDKKHERHPIFGNIVDEVAYHEKYPTIYHLRKKLVDSTDKADLRLIYLALAHMIKFRGHFLIEGDLNPDNSDVDKLFIQLVQTYNQLFEENPINASGVDAKAILSARLSKSRRLENLIAQLPGEKKNGLFGNLIALSLGLTPNFKSNFDLAEDAKLQLSKDTYDDDLDNLLAQIGDQYADLFLAAKNLSDAILLSDILRVNTEITKAPLSASMIKRYDEHHQDLTLLKALVRQQLPEKYKEIFFDQSKNGYAGYIDGGASQEEFYKFIKPILEKMDGTEELLVKLNREDLLRKQRTFDNGSIPHQIHLGELHAILRRQEDFYPFLKDNREKIEKILTFRIPYYVGPLARGNSRFAWMTRKSEETITPWNFEEVVDKGASAQSFIERMTNFDKNLPNEKVLPKHSLLYEYFTVYNELTKVKYVTEGMRKPAFLSGEQKKAIVDLLFKTNRKVTVKQLKEDYFKKIECFDSVEISGVEDRFNASLGTYHDLLKIIKDKDFLDNEENEDILEDIVLTLTLFEDREMIEERLKTYAHLFDDKVMKQLKRRRYTGWGRLSRKLINGIRDKQSGKTILDFLKSDGFANRNFMQLIHDDSLTFKEDIQKAQVSGQGDSLHEHIANLAGSPAIKKGILQTVKVVDELVKVMGRHKPENIVIEMARENQTTQKGQKNSRERMKRIEEGIKELGSQILKEHPVENTQLQNEKLYLYYLQNGRDMYVDQELDINRLSDYDVDHIVPQSFLKDDSIDNKVLTRSDKNRGKSDNVPSEEVVKKMKNYWRQLLNAKLITQRKFDNLTKAERGGLSELDKAGFIKRQLVETRQITKHVAQILDSRMNTKYDENDKLIREVKVITLKSKLVSDFRKDFQFYKVREINNYHHAHDAYLNAVVGTALIKKYPKLESEFVYGDYKVYDVRKMIAKSEQEIGKATAKYFFYSNIMNFFKTEITLANGEIRKRPLIETNGETGEIVWDKGRDFATVRKVLSMPQVNIVKKTEVQTGGFSKESILPKRNSDKLIARKKDWDPKKYGGFDSPTVAYSVLVVAKVEKGKSKKLKSVKELLGITIMERSSFEKNPIDFLEAKGYKEVKKDLIIKLPKYSLFELENGRKRMLASAGELQKGNELALPSKYVNFLYLASHYEKLKGSPEDNEQKQLFVEQHKHYLDEIIEQISEFSKRVILADANLDKVLSAYNKHRDKPIREQAENIIHLFTLTNLGAPAAFKYFDTTIDRKRYTSTKEVLDATLIHQSITGLYETRIDLSQLGGDAGDMRAANLWPSPLMIKRSKKNSLALSLTADQMVSALLDAEPPILYSEYDPTRPFSEASMMGLLTNLADRELVHMINWAKRVPGFVDLTLHDQVHLLECAWLEILMIGLVWRSMEHPVKLLFAPNLLLDRNQGKCVEGMVEIFDMLLATSSRFRMMNLQGEEFVCLKSIILLNSGVYTFLSSTLKSLEEKDHIHRVLDKITDTLIHLMAKAGLTLQQQHQRLAQLLLILSHIRHMSNKGMEHLYSMKCKNVVPLYDLLLEAADAHRLHAPTSRGGASVEETDQSHLATAGSTSSHSLQKYYITGEAEGFPATAPAGGGSAGDMRAANLWPSPLMIKRSKKNSLALSLTADQMVSALLDAEPPILYSEYDPTRPFSEASMMGLLTNLADRELVHMINWAKRVPGFVDLTLHDQVHLLECAWLEILMIGLVWRSMEHPVKLLFAPNLLLDRNQGKCVEGMVEIFDMLLATSSRFRMMNLQGEEFVCLKSIILLNSGVYTFLSSTLKSLEEKDHIHRVLDKITDTLIHLMAKAGLTLQQQHQRLAQLLLILSHIRHMSNKGMEHLYSMKCKNVVPLYDLLLEAADAHRLHAPTSRGGASVEETDQSHLATAGSTSSHSLQKYYITGEAEGFPATA

SEQ ID NO: 39 - protein, 2658 aa, Artificial sequence
  Cas9 variant 28 linkers
APKKKRKVGIHGVPAATGGGSAGDMRAANLWPSPLMIKRSKKNSLALSLTADQMVSALLDAEPPILYSEYDPTRPFSEASMMGLLTNLADRELVHMINWAKRVPGFVDLTLHDQVHLLECAWLEILMIGLVWRSMEHPVKLLFAPNLLLDRNQGKCVEGMVEIFDMLLATSSRFRMMNLQGEEFVCLKSIILLNSGVYTFLSSTLKSLEEKDHIHRVLDKITDTLIHLMAKAGLTLQQQHQRLAQLLLILSHIRHMSNKGMEHLYSMKCKNVVPLYDLLLEAADAHRLHAPTSRGGASVEETDQSHLATAGSTSSHSLQKYYITGEAEGFPATATPGGPRGGSAGDMRAANLWPSPLMIKRSKKNSLALSLTADQMVSALLDAEPPILYSEYDPTRPFSEASMMGLLTNLADRELVHMINWAKRVPGFVDLTLHDQVHLLECAWLEILMIGLVWRSMEHPVKLLFAPNLLLDRNQGKCVEGMVEIFDMLLATSSRFRMMNLQGEEFVCLKSIILLNSGVYTFLSSTLKSLEEKDHIHRVLDKITDTLIHLMAKAGLTLQQQHQRLAQLLLILSHIRHMSNKGMEHLYSMKCKNVVPLYDLLLEAADAHRLHAPTSRGGASVEETDQSHLATAGSTSSHSLQKYYITGEAEGFPATATPESGADKKYSIGLDIGTNSVGWAVITDEYKVPSKKFKVLGNTDRHSIKKNLIGALLFDSGETAEATRLKRTARRRYTRRKNRICYLQEIFSNEMAKVDDSFFHRLEESFLVEEDKKHERHPIFGNIVDEVAYHEKYPTIYHLRKKLVDSTDKADLRLIYLALAHMIKFRGHFLIEGDLNPDNSDVDKLFIQLVQTYNQLFEENPINASGVDAKAILSARLSKSRRLENLIAQLPGEKKNGLFGNLIALSLGLTPNFKSNFDLAEDAKLQLSKDTYDDDLDNLLAQIGDQYADLFLAAKNLSDAILLSDILRVNTEITKAPLSASMIKRYDEHHQDLTLLKALVRQQLPEKYKEIFFDQSKNGYAGYIDGGASQEEFYKFIKPILEKMDGTEELLVKLNREDLLRKQRTFDNGSIPHQIHLGELHAILRRQEDFYPFLKDNREKIEKILTFRIPYYVGPLARGNSRFAWMTRKSEETITPWNFEEVVDKGASAQSFIERMTNFDKNLPNEKVLPKHSLLYEYFTVYNELTKVKYVTEGMRKPAFLSGEQKKAIVDLLFKTNRKVTVKQLKEDYFKKIECFDSVEISGVEDRFNASLGTYHDLLKIIKDKDFLDNEENEDILEDIVLTLTLFEDREMIEERLKTYAHLFDDKVMKQLKRRRYTGWGRLSRKLINGIRDKQSGKTILDFLKSDGFANRNFMQLIHDDSLTFKEDIQKAQVSGQGDSLHEHIANLAGSPAIKKGILQTVKVVDELVKVMGRHKPENIVIEMARENQTTQKGQKNSRERMKRIEEGIKELGSQILKEHPVENTQLQNEKLYLYYLQNGRDMYVDQELDINRLSDYDVDHIVPQSFLKDDSIDNKVLTRSDKNRGKSDNVPSEEVVKKMKNYWRQLLNAKLITQRKFDNLTKAERGGLSELDKAGFIKRQLVETRQITKHVAQILDSRMNTKYDENDKLIREVKVITLKSKLVSDFRKDFQFYKVREINNYHHAHDAYLNAVVGTALIKKYPKLESEFVYGDYKVYDVRKMIAKSEQEIGKATAKYFFYSNIMNFFKTEITLANGEIRKRPLIETNGETGEIVWDKGRDFATVRKVLSMPQVNIVKKTEVQTGGFSKESILPKRNSDKLIARKKDWDPKKYGGFDSPTVAYSVLVVAKVEKGKSKKLKSVKELLGITIMERSSFEKNPIDFLEAKGYKEVKKDLIIKLPKYSLFELENGRKRMLASAGELQKGNELALPSKYVNFLYLASHYEKLKGSPEDNEQKQLFVEQHKHYLDEIIEQISEFSKRVILADANLDKVLSAYNKHRDKPIREQAENIIHLFTLTNLGAPAAFKYFDTTIDRKRYTSTKEVLDATLIHQSITGLYETRIDLSQLGGDAGDMRAANLWPSPLMIKRSKKNSLALSLTADQMVSALLDAEPPILYSEYDPTRPFSEASMMGLLTNLADRELVHMINWAKRVPGFVDLTLHDQVHLLECAWLEILMIGLVWRSMEHPVKLLFAPNLLLDRNQGKCVEGMVEIFDMLLATSSRFRMMNLQGEEFVCLKSIILLNSGVYTFLSSTLKSLEEKDHIHRVLDKITDTLIHLMAKAGLTLQQQHQRLAQLLLILSHIRHMSNKGMEHLYSMKCKNVVPLYDLLLEAADAHRLHAPTSRGGASVEETDQSHLATAGSTSSHSLQKYYITGEAEGFPATAPAGAGDMRAANLWPSPLMIKRSKKNSLALSLTADQMVSALLDAEPPILYSEYDPTRPFSEASMMGLLTNLADRELVHMINWAKRVPGFVDLTLHDQVHLLECAWLEILMIGLVWRSMEHPVKLLFAPNLLLDRNQGKCVEGMVEIFDMLLATSSRFRMMNLQGEEFVCLKSIILLNSGVYTFLSSTLKSLEEKDHIHRVLDKITDTLIHLMAKAGLTLQQQHQRLAQLLLILSHIRHMSNKGMEHLYSMKCKNVVPLYDLLLEAADAHRLHAPTSRGGASVEETDQSHLATAGSTSSHSLQKYYITGEAEGFPATA

SEQ ID NO: 40 - protein, 2661 aa, Artificial sequence
  Cas9 variant 26 linkers
APKKKRKVGIHGVPAATGGGSAGDMRAANLWPSPLMIKRSKKNSLALSLTADQMVSALLDAEPPILYSEYDPTRPFSEASMMGLLTNLADRELVHMINWAKRVPGFVDLTLHDQVHLLECAWLEILMIGLVWRSMEHPVKLLFAPNLLLDRNQGKCVEGMVEIFDMLLATSSRFRMMNLQGEEFVCLKSIILLNSGVYTFLSSTLKSLEEKDHIHRVLDKITDTLIHLMAKAGLTLQQQHQRLAQLLLILSHIRHMSNKGMEHLYSMKCKNVVPLYDLLLEAADAHRLHAPTSRGGASVEETDQSHLATAGSTSSHSLQKYYITGEAEGFPATATPGGPRGGSAGDMRAANLWPSPLMIKRSKKNSLALSLTADQMVSALLDAEPPILYSEYDPTRPFSEASMMGLLTNLADRELVHMINWAKRVPGFVDLTLHDQVHLLECAWLEILMIGLVWRSMEHPVKLLFAPNLLLDRNQGKCVEGMVEIFDMLLATSSRFRMMNLQGEEFVCLKSIILLNSGVYTFLSSTLKSLEEKDHIHRVLDKITDTLIHLMAKAGLTLQQQHQRLAQLLLILSHIRHMSNKGMEHLYSMKCKNVVPLYDLLLEAADAHRLHAPTSRGGASVEETDQSHLATAGSTSSHSLQKYYITGEAEGFPATATPESGADKKYSIGLDIGTNSVGWAVITDEYKVPSKKFKVLGNTDRHSIKKNLIGALLFDSGETAEATRLKRTARRRYTRRKNRICYLQEIFSNEMAKVDDSFFHRLEESFLVEEDKKHERHPIFGNIVDEVAYHEKYPTIYHLRKKLVDSTDKADLRLIYLALAHMIKFRGHFLIEGDLNPDNSDVDKLFIQLVQTYNQLFEENPINASGVDAKAILSARLSKSRRLENLIAQLPGEKKNGLFGNLIALSLGLTPNFKSNFDLAEDAKLQLSKDTYDDDLDNLLAQIGDQYADLFLAAKNLSDAILLSDILRVNTEITKAPLSASMIKRYDEHHQDLTLLKALVRQQLPEKYKEIFFDQSKNGYAGYIDGGASQEEFYKFIKPILEKMDGTEELLVKLNREDLLRKQRTFDNGSIPHQIHLGELHAILRRQEDFYPFLKDNREKIEKILTFRIPYYVGPLARGNSRFAWMTRKSEETITPWNFEEVVDKGASAQSFIERMTNFDKNLPNEKVLPKHSLLYEYFTVYNELTKVKYVTEGMRKPAFLSGEQKKAIVDLLFKTNRKVTVKQLKEDYFKKIECFDSVEISGVEDRFNASLGTYHDLLKIIKDKDFLDNEENEDILEDIVLTLTLFEDREMIEERLKTYAHLFDDKVMKQLKRRRYTGWGRLSRKLINGIRDKQSGKTILDFLKSDGFANRNFMQLIHDDSLTFKEDIQKAQVSGQGDSLHEHIANLAGSPAIKKGILQTVKVVDELVKVMGRHKPENIVIEMARENQTTQKGQKNSRERMKRIEEGIKELGSQILKEHPVENTQLQNEKLYLYYLQNGRDMYVDQELDINRLSDYDVDHIVPQSFLKDDSIDNKVLTRSDKNRGKSDNVPSEEVVKKMKNYWRQLLNAKLITQRKFDNLTKAERGGLSELDKAGFIKRQLVETRQITKHVAQILDSRMNTKYDENDKLIREVKVITLKSKLVSDFRKDFQFYKVREINNYHHAHDAYLNAVVGTALIKKYPKLESEFVYGDYKVYDVRKMIAKSEQEIGKATAKYFFYSNIMNFFKTEITLANGEIRKRPLIETNGETGEIVWDKGRDFATVRKVLSMPQVNIVKKTEVQTGGFSKESILPKRNSDKLIARKKDWDPKKYGGFDSPTVAYSVLVVAKVEKGKSKKLKSVKELLGITIMERSSFEKNPIDFLEAKGYKEVKKDLIIKLPKYSLFELENGRKRMLASAGELQKGNELALPSKYVNFLYLASHYEKLKGSPEDNEQKQLFVEQHKHYLDEIIEQISEFSKRVILADANLDKVLSAYNKHRDKPIREQAENIIHLFTLTNLGAPAAFKYFDTTIDRKRYTSTKEVLDATLIHQSITGLYETRIDLSQLGGDAGDMRAANLWPSPLMIKRSKKNSLALSLTADQMVSALLDAEPPILYSEYDPTRPFSEASMMGLLTNLADRELVHMINWAKRVPGFVDLTLHDQVHLLECAWLEILMIGLVWRSMEHPVKLLFAPNLLLDRNQGKCVEGMVEIFDMLLATSSRFRMMNLQGEEFVCLKSIILLNSGVYTFLSSTLKSLEEKDHIHRVLDKITDTLIHLMAKAGLTLQQQHQRLAQLLLILSHIRHMSNKGMEHLYSMKCKNVVPLYDLLLEAADAHRLHAPTSRGGASVEETDQSHLATAGSTSSHSLQKYYITGEAEGFPATAPAGGGSAGDMRAANLWPSPLMIKRSKKNSLALSLTADQMVSALLDAEPPILYSEYDPTRPFSEASMMGLLTNLADRELVHMINWAKRVPGFVDLTLHDQVHLLECAWLEILMIGLVWRSMEHPVKLLFAPNLLLDRNQGKCVEGMVEIFDMLLATSSRFRMMNLQGEEFVCLKSIILLNSGVYTFLSSTLKSLEEKDHIHRVLDKITDTLIHLMAKAGLTLQQQHQRLAQLLLILSHIRHMSNKGMEHLYSMKCKNVVPLYDLLLEAADAHRLHAPTSRGGASVEETDQSHLATAGSTSSHSLQKYYITGEAEGFPATA

SEQ ID NO: 41 - protein, 2020 aa, Artificial sequence
  Cas9 variant 10 linkers
APKKKRKVGIHGVPAATGAGDMRAANLWPSPLMIKRSKKNSLALSLTADQMVSALLDAEPPILYSEYDPTRPFSEASMMGLLTNLADRELVHMINWAKRVPGFVDLTLHDQVHLLECAWLEILMIGLVWRSMEHPVKLLFAPNLLLDRNQGKCVEGMVEIFDMLLATSSRFRMMNLQGEEFVCLKSIILLNSGVYTFLSSTLKSLEEKDHIHRVLDKITDTLIHLMAKAGLTLQQQHQRLAQLLLILSHIRHMSNKGMEHLYSMKCKNVVPLYDLLLEAADAHRLHAPTSRGGASVEETDQSHLATAGSTSSHSLQKYYITGEAEGFPATATPESGPGGADKKYSIGLDIGTNSVGWAVITDEYKVPSKKFKVLGNTDRHSIKKNLIGALLFDSGETAEATRLKRTARRRYTRRKNRICYLQEIFSNEMAKVDDSFFHRLEESFLVEEDKKHERHPIFGNIVDEVAYHEKYPTIYHLRKKLVDSTDKADLRLIYLALAHMIKFRGHFLIEGDLNPDNSDVDKLFIQLVQTYNQLFEENPINASGVDAKAILSARLSKSRRLENLIAQLPGEKKNGLFGNLIALSLGLTPNFKSNFDLAEDAKLQLSKDTYDDDLDNLLAQIGDQYADLFLAAKNLSDAILLSDILRVNTEITKAPLSASMIKRYDEHHQDLTLLKALVRQQLPEKYKEIFFDQSKNGYAGYIDGGASQEEFYKFIKPILEKMDGTEELLVKLNREDLLRKQRTFDNGSIPHQIHLGELHAILRRQEDFYPFLKDNREKIEKILTFRIPYYVGPLARGNSRFAWMTRKSEETITPWNFEEVVDKGASAQSFIERMTNFDKNLPNEKVLPKHSLLYEYFTVYNELTKVKYVTEGMRKPAFLSGEQKKAIVDLLFKTNRKVTVKQLKEDYFKKIECFDSVEISGVEDRFNASLGTYHDLLKIIKDKDFLDNEENEDILEDIVLTLTLFEDREMIEERLKTYAHLFDDKVMKQLKRRRYTGWGRLSRKLINGIRDKQSGKTILDFLKSDGFANRNFMQLIHDDSLTFKEDIQKAQVSGQGDSLHEHIANLAGSPAIKKGILQTVKVVDELVKVMGRHKPENIVIEMARENQTTQKGQKNSRERMKRIEEGIKELGSQILKEHPVENTQLQNEKLYLYYLQNGRDMYVDQELDINRLSDYDVDHIVPQSFLKDDSIDNKVLTRSDKNRGKSDNVPSEEVVKKMKNYWRQLLNAKLITQRKFDNLTKAERGGLSELDKAGFIKRQLVETRQITKHVAQILDSRMNTKYDENDKLIREVKVITLKSKLVSDFRKDFQFYKVREINNYHHAHDAYLNAVVGTALIKKYPKLESEFVYGDYKVYDVRKMIAKSEQEIGKATAKYFFYSNIMNFFKTEITLANGEIRKRPLIETNGETGEIVWDKGRDFATVRKVLSMPQVNIVKKTEVQTGGFSKESILPKRNSDKLIARKKDWDPKKYGGFDSPTVAYSVLVVAKVEKGKSKKLKSVKELLGITIMERSSFEKNPIDFLEAKGYKEVKKDLIIKLPKYSLFELENGRKRMLASAGELQKGNELALPSKYVNFLYLASHYEKLKGSPEDNEQKQLFVEQHKHYLDEIIEQISEFSKRVILADANLDKVLSAYNKHRDKPIREQAENIIHLFTLTNLGAPAAFKYFDTTIDRKRYTSTKEVLDATLIHQSITGLYETRIDLSQLGGDAGDMRAANLWPSPLMIKRSKKNSLALSLTADQMVSALLDAEPPILYSEYDPTRPFSEASMMGLLTNLADRELVHMINWAKRVPGFVDLTLHDQVHLLECAWLEILMIGLVWRSMEHPVKLLFAPNLLLDRNQGKCVEGMVEIFDMLLATSSRFRMMNLQGEEFVCLKSIILLNSGVYTFLSSTLKSLEEKDHIHRVLDKITDTLIHLMAKAGLTLQQQHQRLAQLLLILSHIRHMSNKGMEHLYSMKCKNVVPLYDLLLEAADAHRLHAPTSRGGASVEETDQSHLATAGSTSSHSLQKYYITGEAEGFPATA

SEQ ID NO: 42 - protein, 2338 aa, Artificial sequence
  Cas9 variant 20 linkers
APKKKRKVGIHGVPAATGAGDMRAANLWPSPLMIKRSKKNSLALSLTADQMVSALLDAEPPILYSEYDPTRPFSEASMMGLLTNLADRELVHMINWAKRVPGFVDLTLHDQVHLLECAWLEILMIGLVWRSMEHPVKLLFAPNLLLDRNQGKCVEGMVEIFDMLLATSSRFRMMNLQGEEFVCLKSIILLNSGVYTFLSSTLKSLEEKDHIHRVLDKITDTLIHLMAKAGLTLQQQHQRLAQLLLILSHIRHMSNKGMEHLYSMKCKNVVPLYDLLLEAADAHRLHAPTSRGGASVEETDQSHLATAGSTSSHSLQKYYITGEAEGFPATAGGSPRGGSAGDMRAANLWPSPLMIKRSKKNSLALSLTADQMVSALLDAEPPILYSEYDPTRPFSEASMMGLLTNLADRELVHMINWAKRVPGFVDLTLHDQVHLLECAWLEILMIGLVWRSMEHPVKLLFAPNLLLDRNQGKCVEGMVEIFDMLLATSSRFRMMNLQGEEFVCLKSIILLNSGVYTFLSSTLKSLEEKDHIHRVLDKITDTLIHLMAKAGLTLQQQHQRLAQLLLILSHIRHMSNKGMEHLYSMKCKNVVPLYDLLLEAADAHRLHAPTSRGGASVEETDQSHLATAGSTSSHSLQKYYITGEAEGFPATATPESGADKKYSIGLDIGTNSVGWAVITDEYKVPSKKFKVLGNTDRHSIKKNLIGALLFDSGETAEATRLKRTARRRYTRRKNRICYLQEIFSNEMAKVDDSFFHRLEESFLVEEDKKHERHPIFGNIVDEVAYHEKYPTIYHLRKKLVDSTDKADLRLIYLALAHMIKFRGHFLIEGDLNPDNSDVDKLFIQLVQTYNQLFEENPINASGVDAKAILSARLSKSRRLENLIAQLPGEKKNGLFGNLIALSLGLTPNFKSNFDLAEDAKLQLSKDTYDDDLDNLLAQIGDQYADLFLAAKNLSDAILLSDILRVNTEITKAPLSASMIKRYDEHHQDLTLLKALVRQQLPEKYKEIFFDQSKNGYAGYIDGGASQEEFYKFIKPILEKMDGTEELLVKLNREDLLRKQRTFDNGSIPHQIHLGELHAILRRQEDFYPFLKDNREKIEKILTFRIPYYVGPLARGNSRFAWMTRKSEETITPWNFEEVVDKGASAQSFIERMTNFDKNLPNEKVLPKHSLLYEYFTVYNELTKVKYVTEGMRKPAFLSGEQKKAIVDLLFKTNRKVTVKQLKEDYFKKIECFDSVEISGVEDRFNASLGTYHDLLKIIKDKDFLDNEENEDILEDIVLTLTLFEDREMIEERLKTYAHLFDDKVMKQLKRRRYTGWGRLSRKLINGIRDKQSGKTILDFLKSDGFANRNFMQLIHDDSLTFKEDIQKAQVSGQGDSLHEHIANLAGSPAIKKGILQTVKVVDELVKVMGRHKPENIVIEMARENQTTQKGQKNSRERMKRIEEGIKELGSQILKEHPVENTQLQNEKLYLYYLQNGRDMYVDQELDINRLSDYDVDHIVPQSFLKDDSIDNKVLTRSDKNRGKSDNVPSEEVVKKMKNYWRQLLNAKLITQRKFDNLTKAERGGLSELDKAGFIKRQLVETRQITKHVAQILDSRMNTKYDENDKLIREVKVITLKSKLVSDFRKDFQFYKVREINNYHHAHDAYLNAVVGTALIKKYPKLESEFVYGDYKVYDVRKMIAKSEQEIGKATAKYFFYSNIMNFFKTEITLANGEIRKRPLIETNGETGEIVWDKGRDFATVRKVLSMPQVNIVKKTEVQTGGFSKESILPKRNSDKLIARKKDWDPKKYGGFDSPTVAYSVLVVAKVEKGKSKKLKSVKELLGITIMERSSFEKNPIDFLEAKGYKEVKKDLIIKLPKYSLFELENGRKRMLASAGELQKGNELALPSKYVNFLYLASHYEKLKGSPEDNEQKQLFVEQHKHYLDEIIEQISEFSKRVILADANLDKVLSAYNKHRDKPIREQAENIIHLFTLTNLGAPAAFKYFDTTIDRKRYTSTKEVLDATLIHQSITGLYETRIDLSQLGGDAGDMRAANLWPSPLMIKRSKKNSLALSLTADQMVSALLDAEPPILYSEYDPTRPFSEASMMGLLTNLADRELVHMINWAKRVPGFVDLTLHDQVHLLECAWLEILMIGLVWRSMEHPVKLLFAPNLLLDRNQGKCVEGMVEIFDMLLATSSRFRMMNLQGEEFVCLKSIILLNSGVYTFLSSTLKSLEEKDHIHRVLDKITDTLIHLMAKAGLTLQQQHQRLAQLLLILSHIRHMSNKGMEHLYSMKCKNVVPLYDLLLEAADAHRLHAPTSRGGASVEETDQSHLATAGSTSSHSLQKYYITGEAEGFPATA

SEQ ID NO: 43 - protein, 2654 aa, Artificial sequence
  Cas9 variant 29 linkers
APKKKRKVGIHGVPAATGAGDMRAANLWPSPLMIKRSKKNSLALSLTADQMVSALLDAEPPILYSEYDPTRPFSEASMMGLLTNLADRELVHMINWAKRVPGFVDLTLHDQVHLLECAWLEILMIGLVWRSMEHPVKLLFAPNLLLDRNQGKCVEGMVEIFDMLLATSSRFRMMNLQGEEFVCLKSIILLNSGVYTFLSSTLKSLEEKDHIHRVLDKITDTLIHLMAKAGLTLQQQHQRLAQLLLILSHIRHMSNKGMEHLYSMKCKNVVPLYDLLLEAADAHRLHAPTSRGGASVEETDQSHLATAGSTSSHSLQKYYITGEAEGFPATAGGSPRGGSAGDMRAANLWPSPLMIKRSKKNSLALSLTADQMVSALLDAEPPILYSEYDPTRPFSEASMMGLLTNLADRELVHMINWAKRVPGFVDLTLHDQVHLLECAWLEILMIGLVWRSMEHPVKLLFAPNLLLDRNQGKCVEGMVEIFDMLLATSSRFRMMNLQGEEFVCLKSIILLNSGVYTFLSSTLKSLEEKDHIHRVLDKITDTLIHLMAKAGLTLQQQHQRLAQLLLILSHIRHMSNKGMEHLYSMKCKNVVPLYDLLLEAADAHRLHAPTSRGGASVEETDQSHLATAGSTSSHSLQKYYITGEAEGFPATATPESGADKKYSIGLDIGTNSVGWAVITDEYKVPSKKFKVLGNTDRHSIKKNLIGALLFDSGETAEATRLKRTARRRYTRRKNRICYLQEIFSNEMAKVDDSFFHRLEESFLVEEDKKHERHPIFGNIVDEVAYHEKYPTIYHLRKKLVDSTDKADLRLIYLALAHMIKFRGHFLIEGDLNPDNSDVDKLFIQLVQTYNQLFEENPINASGVDAKAILSARLSKSRRLENLIAQLPGEKKNGLFGNLIALSLGLTPNFKSNFDLAEDAKLQLSKDTYDDDLDNLLAQIGDQYADLFLAAKNLSDAILLSDILRVNTEITKAPLSASMIKRYDEHHQDLTLLKALVRQQLPEKYKEIFFDQSKNGYAGYIDGGASQEEFYKFIKPILEKMDGTEELLVKLNREDLLRKQRTFDNGSIPHQIHLGELHAILRRQEDFYPFLKDNREKIEKILTFRIPYYVGPLARGNSRFAWMTRKSEETITPWNFEEVVDKGASAQSFIERMTNFDKNLPNEKVLPKHSLLYEYFTVYNELTKVKYVTEGMRKPAFLSGEQKKAIVDLLFKTNRKVTVKQLKEDYFKKIECFDSVEISGVEDRFNASLGTYHDLLKIIKDKDFLDNEENEDILEDIVLTLTLFEDREMIEERLKTYAHLFDDKVMKQLKRRRYTGWGRLSRKLINGIRDKQSGKTILDFLKSDGFANRNFMQLIHDDSLTFKEDIQKAQVSGQGDSLHEHIANLAGSPAIKKGILQTVKVVDELVKVMGRHKPENIVIEMARENQTTQKGQKNSRERMKRIEEGIKELGSQILKEHPVENTQLQNEKLYLYYLQNGRDMYVDQELDINRLSDYDVDHIVPQSFLKDDSIDNKVLTRSDKNRGKSDNVPSEEVVKKMKNYWRQLLNAKLITQRKFDNLTKAERGGLSELDKAGFIKRQLVETRQITKHVAQILDSRMNTKYDENDKLIREVKVITLKSKLVSDFRKDFQFYKVREINNYHHAHDAYLNAVVGTALIKKYPKLESEFVYGDYKVYDVRKMIAKSEQEIGKATAKYFFYSNIMNFFKTEITLANGEIRKRPLIETNGETGEIVWDKGRDFATVRKVLSMPQVNIVKKTEVQTGGFSKESILPKRNSDKLIARKKDWDPKKYGGFDSPTVAYSVLVVAKVEKGKSKKLKSVKELLGITIMERSSFEKNPIDFLEAKGYKEVKKDLIIKLPKYSLFELENGRKRMLASAGELQKGNELALPSKYVNFLYLASHYEKLKGSPEDNEQKQLFVEQHKHYLDEIIEQISEFSKRVILADANLDKVLSAYNKHRDKPIREQAENIIHLFTLTNLGAPAAFKYFDTTIDRKRYTSTKEVLDATLIHQSITGLYETRIDLSQLGGDAGDMRAANLWPSPLMIKRSKKNSLALSLTADQMVSALLDAEPPILYSEYDPTRPFSEASMMGLLTNLADRELVHMINWAKRVPGFVDLTLHDQVHLLECAWLEILMIGLVWRSMEHPVKLLFAPNLLLDRNQGKCVEGMVEIFDMLLATSSRFRMMNLQGEEFVCLKSIILLNSGVYTFLSSTLKSLEEKDHIHRVLDKITDTLIHLMAKAGLTLQQQHQRLAQLLLILSHIRHMSNKGMEHLYSMKCKNVVPLYDLLLEAADAHRLHAPTSRGGASVEETDQSHLATAGSTSSHSLQKYYITGEAEGFPATAPAGAGDMRAANLWPSPLMIKRSKKNSLALSLTADQMVSALLDAEPPILYSEYDPTRPFSEASMMGLLTNLADRELVHMINWAKRVPGFVDLTLHDQVHLLECAWLEILMIGLVWRSMEHPVKLLFAPNLLLDRNQGKCVEGMVEIFDMLLATSSRFRMMNLQGEEFVCLKSIILLNSGVYTFLSSTLKSLEEKDHIHRVLDKITDTLIHLMAKAGLTLQQQHQRLAQLLLILSHIRHMSNKGMEHLYSMKCKNVVPLYDLLLEAADAHRLHAPTSRGGASVEETDQSHLATAGSTSSHSLQKYYITGEAEGFPATA

SEQ ID NO: 44 - protein, 2016 aa, Artificial sequence
  Cas9 variant 18 linkers
APKKKRKVGIHGVPAATGAGDMRAANLWPSPLMIKRSKKNSLALSLTADQMVSALLDAEPPILYSEYDPTRPFSEASMMGLLTNLADRELVHMINWAKRVPGFVDLTLHDQVHLLECAWLEILMIGLVWRSMEHPVKLLFAPNLLLDRNQGKCVEGMVEIFDMLLATSSRFRMMNLQGEEFVCLKSIILLNSGVYTFLSSTLKSLEEKDHIHRVLDKITDTLIHLMAKAGLTLQQQHQRLAQLLLILSHIRHMSNKGMEHLYSMKCKNVVPLYDLLLEAADAHRLHAPTSRGGASVEETDQSHLATAGSTSSHSLQKYYITGEAEGFPATAGASGSDKKYSIGLDIGTNSVGWAVITDEYKVPSKKFKVLGNTDRHSIKKNLIGALLFDSGETAEATRLKRTARRRYTRRKNRICYLQEIFSNEMAKVDDSFFHRLEESFLVEEDKKHERHPIFGNIVDEVAYHEKYPTIYHLRKKLVDSTDKADLRLIYLALAHMIKFRGHFLIEGDLNPDNSDVDKLFIQLVQTYNQLFEENPINASGVDAKAILSARLSKSRRLENLIAQLPGEKKNGLFGNLIALSLGLTPNFKSNFDLAEDAKLQLSKDTYDDDLDNLLAQIGDQYADLFLAAKNLSDAILLSDILRVNTEITKAPLSASMIKRYDEHHQDLTLLKALVRQQLPEKYKEIFFDQSKNGYAGYIDGGASQEEFYKFIKPILEKMDGTEELLVKLNREDLLRKQRTFDNGSIPHQIHLGELHAILRRQEDFYPFLKDNREKIEKILTFRIPYYVGPLARGNSRFAWMTRKSEETITPWNFEEVVDKGASAQSFIERMTNFDKNLPNEKVLPKHSLLYEYFTVYNELTKVKYVTEGMRKPAFLSGEQKKAIVDLLFKTNRKVTVKQLKEDYFKKIECFDSVEISGVEDRFNASLGTYHDLLKIIKDKDFLDNEENEDILEDIVLTLTLFEDREMIEERLKTYAHLFDDKVMKQLKRRRYTGWGRLSRKLINGIRDKQSGKTILDFLKSDGFANRNFMQLIHDDSLTFKEDIQKAQVSGQGDSLHEHIANLAGSPAIKKGILQTVKVVDELVKVMGRHKPENIVIEMARENQTTQKGQKNSRERMKRIEEGIKELGSQILKEHPVENTQLQNEKLYLYYLQNGRDMYVDQELDINRLSDYDVDHIVPQSFLKDDSIDNKVLTRSDKNRGKSDNVPSEEVVKKMKNYWRQLLNAKLITQRKFDNLTKAERGGLSELDKAGFIKRQLVETRQITKHVAQILDSRMNTKYDENDKLIREVKVITLKSKLVSDFRKDFQFYKVREINNYHHAHDAYLNAVVGTALIKKYPKLESEFVYGDYKVYDVRKMIAKSEQEIGKATAKYFFYSNIMNFFKTEITLANGEIRKRPLIETNGETGEIVWDKGRDFATVRKVLSMPQVNIVKKTEVQTGGFSKESILPKRNSDKLIARKKDWDPKKYGGFDSPTVAYSVLVVAKVEKGKSKKLKSVKELLGITIMERSSFEKNPIDFLEAKGYKEVKKDLIIKLPKYSLFELENGRKRMLASAGELQKGNELALPSKYVNFLYLASHYEKLKGSPEDNEQKQLFVEQHKHYLDEIIEQISEFSKRVILADANLDKVLSAYNKHRDKPIREQAENIIHLFTLTNLGAPAAFKYFDTTIDRKRYTSTKEVLDATLIHQSITGLYETRIDLSQLGGDAGDMRAANLWPSPLMIKRSKKNSLALSLTADQMVSALLDAEPPILYSEYDPTRPFSEASMMGLLTNLADRELVHMINWAKRVPGFVDLTLHDQVHLLECAWLEILMIGLVWRSMEHPVKLLFAPNLLLDRNQGKCVEGMVEIFDMLLATSSRFRMMNLQGEEFVCLKSIILLNSGVYTFLSSTLKSLEEKDHIHRVLDKITDTLIHLMAKAGLTLQQQHQRLAQLLLILSHIRHMSNKGMEHLYSMKCKNVVPLYDLLLEAADAHRLHAPTSRGGASVEETDQSHLATAGSTSSHSLQKYYITGEAEGFPATA

SEQ ID NO: 45 - DNA, 6906 bp, Artificial Sequence
  cloned, variant sequence 1
atgggcaagcccatccctaaccccctgttggggctggacagcaccgctcccaaaaagaaaaggaaggtgggcattcacggcgtgcctgcggccaccggtgctggagacatgagagctgccaacctttggccaagcccgctcatgatcaaacgctctaagaagaacagcctggccttgtccctgacggccgaccagatggtcagtgccttgttggatgctgagccccccatactctattccgagtatgatcctaccagacccttcagtgaagcttcgatgatgggcttactgaccaacctggcagacagggagctggttcacatgatcaactgggcgaagagggtgccaggctttgtggatttgaccctccatgatcaggtccaccttcttgaatgtgcctggctagagatcctgatgattggtctcgtctggcgctccatggagcacccagtgaagctactgtttgctcctaacttgctcttggacaggaaccagggaaaatgtgtagagggcatggtggagatcttcgacatgctgctggctacatcatctcggttccgcatgatgaatctgcagggagaggagtttgtgtgcctcaaatctattattttgcttaattctggagtgtacacatttctgtccagcaccctgaagtctctggaagagaaggaccatatccaccgagtcctggacaagatcacagacactttgatccacctgatggccaaggcaggcctgaccctgcagcagcagcaccagcggctggcccagctcctcctcatcctctcccacatcaggcacatgagtaacaaaggcatggagcatctgtacagcatgaagtgcaagaacgtggtgcccctctatgacctgctgctggaggcggcggacgcccaccgcctacatgcgcccactagccgtggaggggcatccgtggaggagacggaccaaagccacttggccactgcgggctctacttcatcgcattccttgcaaaagtattacatcacgggggaggcagagggtttccctgccacagctagcggcagcgagactcccgggacctcagagtccgccggcgccgacaaaaagtacagcatcggccttgatatcggcaccaatagcgtgggctgggccgttatcacagacgaatacaaggtacccagcaagaagttcaaggtgctggggaatacagacaggcactctatcaagaaaaaccttatcggggctctgctgtttgactcaggcgagaccgccgaggccaccaggttgaagaggaccgcaaggcgaaggtacacccggaggaagaacaggatctgctatctgcaggagatcttcagcaacgagatggccaaggtggacgacagcttcttccacaggctggaggagagcttccttgtcgaggaggataagaagcacgaacgacaccccatcttcggcaacatagtcgacgaggtcgcttatcacgagaagtaccccaccatctaccacctgcgaaagaaattggtggatagcaccgataaagccgacttgcgacttatctacttggctctggcgcacatgattaagttcaggggccacttcctgatcgagggcgaccttaaccccgacaacagtgacgtagacaaattgttcatccagcttgtacagacctataaccagctgttcgaggaaaaccctattaacgccagcggggtggatgcgaaggccatacttagcgccaggctgagcaaaagcaggcgcttggagaacctgatagcccagctgcccggtgaaaagaagaacggcctcttcggtaatctgattgccctgagcctgggcctgacccccaacttcaagagcaacttcgacctggcagaagatgccaagctgcagttgagtaaggacacctatgacgacgacttggacaatctgctcgcccaaatcggcgaccagtacgctgacctgttcctcgccgccaagaacctttctgacgcaatcctgcttagcgatatccttagggtgaacacagagatcaccaaggcccccctgagcgccagcatgatcaagaggtacgacgagcaccatcaggacctgacccttctgaaggccctggtgaggcagcaactgcccgagaagtacaaggagatctttttcgaccagagcaagaacggctacgccggctacatcgacggcggagccagccaagaggagttctacaagttcatcaagcccatcctggagaagatggatggcaccgaggagctgctggtgaagctgaacagggaagatttgctccggaagcagaggacctttgacaacggtagcatcccccaccagatccacctgggcgagctgcacgcaatactgaggcgacaggaggatttctaccccttcctcaaggacaatagggagaaaatcgaaaagattctgaccttcaggatcccctactacgtgggccctcttgccaggggcaacagccgattcgcttggatgacaagaaagagcgaggagaccatcaccccctggaacttcgaggaagtggtggacaaaggagcaagcgcgcagtctttcatcgaacggatgaccaatttcgacaaaaacctgcctaacgagaaggtgctgcccaagcacagcctgctttacgagtacttcaccgtgtacaacgagctcaccaaggtgaaatatgtgaccgagggcatgcgaaaacccgctttcctgagcggcgagcagaagaaggccatcgtggacctgctgttcaagaccaacaggaaggtgaccgtgaagcagctgaaggaggactacttcaagaagatcgagtgctttgatagcgtggaaataagcggcgtggaggacaggttcaacgccagcctgggcacctaccacgacttgttgaagataatcaaagacaaggatttcctggataatgaggagaacgaggatatactcgaggacatcgtgctgactttgaccctgtttgaggaccgagagatgattgaagaaaggctcaaaacctacgcccacctgttcgacgacaaagtgatgaaacaactgaagagacgaagatacaccggctggggcagactgtccaggaagctcatcaacggcattagggacaagcagagcggcaagaccatcctggatttcctgaagtccgacggcttcgccaaccgaaacttcatgcagctgattcacgatgacagcttgaccttcaaggaggacatccagaaggcccaggttagcggccagggcgactccctgcacgaacatattgcaaacctggcaggctcccctgcgatcaagaagggcatactgcagaccgttaaggttgtggacgaattggtcaaggtcatgggcaggcacaagcccgaaaacatagttatagagatggccagagagaaccagaccacccaaaagggccagaagaacagccgggagcgcatgaaaaggatcgaggagggtatcaaggaactcggaagccagatcctcaaagagcaccccgtggagaatacccagctccagaacgagaagctgtacctgtactacctgcagaacggcagggacatgtacgttgaccaggagttggacatcaacaggctttcagactatgacgtggatcacatagtgccccagagctttcttaaagacgatagcatcgacaacaaggtcctgacccgctccgacaaaaacaggggcaaaagcgacaacgtgccaagcgaagaggtggttaaaaagatgaagaactactggaggcaactgctcaacgcgaaattgatcacccagagaaagttcgataacctgaccaaggccgagaggggcggactctccgaacttgacaaagcgggcttcataaagaggcagctggtcgagacccgacagatcacgaagcacgtggcccaaatcctcgacagcagaatgaataccaagtacgatgagaatgacaaactcatcagggaagtgaaagtgattaccctgaagagcaagttggtgtccgactttcgcaaagatttccagttctacaaggtgagggagatcaacaactaccaccatgcccacgacgcatacctgaacgccgtggtcggcaccgccctgattaagaagtatccaaagctggagtccgaatttgtctacggcgactacaaagtttacgatgtgaggaagatgatcgctaagagcgaacaggagatcggcaaggccaccgctaagtatttcttctacagcaacatcatgaactttttcaagaccgagatcacacttgccaacggcgaaatcaggaagaggccgcttatcgagaccaacggtgagaccggcgagatcgtgtgggacaagggcagggacttcgccaccgtgaggaaagtcctgagcatgccccaggtgaatattgtgaaaaaaactgaggtgcagacaggcggctttagcaaggaatccatcctgcccaagaggaacagcgacaagctgatcgcccggaagaaggactgggaccctaagaagtatggaggcttcgacagccccaccgtagcctacagcgtgctggtggtcgcgaaggtagagaaggggaagagcaagaaactgaagagcgtgaaggagctgctcggcataaccatcatggagaggtccagctttgagaagaaccccattgactttttggaagccaagggctacaaagaggtcaaaaaggacctgatcatcaaactccccaagtactccctgtttgaattggagaacggcagaaagaggatgctggcgagcgctggggaactgcaaaagggcaacgaactggcgctgcccagcaagtacgtgaattttctgtacctggcgtcccactacgaaaagctgaaaggcagccccgaggacaacgagcagaagcagctgttcgtggagcagcacaagcattacctggacgagataatcgagcaaatcagcgagttcagcaagagggtgattctggccgacgcgaacctggataaggtcctcagcgcctacaacaagcaccgagacaaacccatcagggagcaggccgagaatatcatacacctgttcaccctgacaaatctgggcgcacctgcggcattcaaatacttcgataccaccatcgacaggaaaaggtacactagcactaaggaggtgctggatgccaccttgatccaccagtccattaccggcctgtatgagaccaggatcgacctgagccagcttggaggcgactctagggcggacccaaaaaagaaaaggaaggtggaattcgctggagacatgagagctgccaacctttggccaagcccgctcatgatcaaacgctctaagaagaacagcctggccttgtccctgacggccgaccagatggtcagtgccttgttggatgctgagccccccatactctattccgagtatgatcctaccagacccttcagtgaagcttcgatgatgggcttactgaccaacctggcagacagggagctggttcacatgatcaactgggcgaagagggtgccaggctttgtggatttgaccctccatgatcaggtccaccttcttgaatgtgcctggctagagatcctgatgattggtctcgtctggcgctccatggagcacccagtgaagctactgtttgctcctaacttgctcttggacaggaaccagggaaaatgtgtagagggcatggtggagatcttcgacatgctgctggctacatcatctcggttccgcatgatgaatctgcagggagaggagtttgtgtgcctcaaatctattattttgcttaattctggagtgtacacatttctgtccagcaccctgaagtctctggaagagaaggaccatatccaccgagtcctggacaagatcacagacactttgatccacctgatggccaaggcaggcctgaccctgcagcagcagcaccagcggctggcccagctcctcctcatcctctcccacatcaggcacatgagtaacaaaggcatggagcatctgtacagcatgaagtgcaagaacgtggtgcccctctatgacctgctgctggaggcggcggacgcccaccgcctacatgcgcccactagccgtggaggggcatccgtggaggagacggaccaaagccacttggccactgcgggctctacttcatcgcattccttgcaaaagtattacatcacgggggaggcagagggtttccctgccacagcttctagaggcagtggagagggcagaggaagtctgctaacatgcggtgacgtcgaggagaatcctggcccaatgaacctgagcaaaaacgtgagcgtgagcgtgtatatgaaggggaacgtcaacaatcatgagtttgagtacgacggggaaggtggtggtgatccttatacaggtaaatattccatgaagatgacgctacgtggtcaaaattccctacccttttcctatgatatcattaccacggcatttcagtatggtttccgcgtatttacaaaataccctgagggaattgttgactattttaaggactcgcttcccgacgcattccagtggaacagacgaattgtgtttgaagatggtggagtactaaacatgagcagtgatatcacatataaagataatgttctgcatggtgacgtcaaggctgagggagtgaacttcccgccgaatgggccagtgatgaagaatgaaattgtgatggaggaaccgactgaagaaacatttactccaaaaaacggggttcttgttggcttttgtcccaaagcgtacttacttaaagacggttcctattactatggaaatatgacaacattttacagatccaagaaatctggccaggcacctcctgggtatcactttgttaagcatcgtctcgtcaagaccaatgtgggacatggatttaagacggttgagcagactgaatatgccactgctcatgtcagtgatcttcccaagttcgaagcttga

SEQ ID NO: 46 - DNA, 6882 bp, Artificial sequence
  cloned, variant sequence 2
atgggcaagcccatccctaaccccctgttggggctggacagcaccgctcccaaaaagaaaaggaaggtgggcattcacggcgtgcctgcggccaccggtgctggagacatgagagctgccaacctttggccaagcccgctcatgatcaaacgctctaagaagaacagcctggccttgtccctgacggccgaccagatggtcagtgccttgttggatgctgagccccccatactctattccgagtatgatcctaccagacccttcagtgaagcttcgatgatgggcttactgaccaacctggcagacagggagctggttcacatgatcaactgggcgaagagggtgccaggctttgtggatttgaccctccatgatcaggtccaccttcttgaatgtgcctggctagagatcctgatgattggtctcgtctggcgctccatggagcacccagtgaagctactgtttgctcctaacttgctcttggacaggaaccagggaaaatgtgtagagggcatggtggagatcttcgacatgctgctggctacatcatctcggttccgcatgatgaatctgcagggagaggagtttgtgtgcctcaaatctattattttgcttaattctggagtgtacacatttctgtccagcaccctgaagtctctggaagagaaggaccatatccaccgagtcctggacaagatcacagacactttgatccacctgatggccaaggcaggcctgaccctgcagcagcagcaccagcggctggcccagctcctcctcatcctctcccacatcaggcacatgagtaacaaaggcatggagcatctgtacagcatgaagtgcaagaacgtggtgcccctctatgacctgctgctggaggcggcggacgcccaccgcctacatgcgcccactagccgtggaggggcatccgtggaggagacggaccaaagccacttggccactgcgggctctacttcatcgcattccttgcaaaagtattacatcacgggggaggcagagggtttccctgccacagcttccggatctgaaggcgccgacaaaaagtacagcatcggccttgatatcggcaccaatagcgtgggctgggccgttatcacagacgaatacaaggtacccagcaagaagttcaaggtgctggggaatacagacaggcactctatcaagaaaaaccttatcggggctctgctgtttgactcaggcgagaccgccgaggccaccaggttgaagaggaccgcaaggcgaaggtacacccggaggaagaacaggatctgctatctgcaggagatcttcagcaacgagatggccaaggtggacgacagcttcttccacaggctggaggagagcttccttgtcgaggaggataagaagcacgaacgacaccccatcttcggcaacatagtcgacgaggtcgcttatcacgagaagtaccccaccatctaccacctgcgaaagaaattggtggatagcaccgataaagccgacttgcgacttatctacttggctctggcgcacatgattaagttcaggggccacttcctgatcgagggcgaccttaaccccgacaacagtgacgtagacaaattgttcatccagcttgtacagacctataaccagctgttcgaggaaaaccctattaacgccagcggggtggatgcgaaggccatacttagcgccaggctgagcaaaagcaggcgcttggagaacctgatagcccagctgcccggtgaaaagaagaacggcctcttcggtaatctgattgccctgagcctgggcctgacccccaacttcaagagcaacttcgacctggcagaagatgccaagctgcagttgagtaaggacacctatgacgacgacttggacaatctgctcgcccaaatcggcgaccagtacgctgacctgttcctcgccgccaagaacctttctgacgcaatcctgcttagcgatatccttagggtgaacacagagatcaccaaggcccccctgagcgccagcatgatcaagaggtacgacgagcaccatcaggacctgacccttctgaaggccctggtgaggcagcaactgcccgagaagtacaaggagatctttttcgaccagagcaagaacggctacgccggctacatcgacggcggagccagccaagaggagttctacaagttcatcaagcccatcctggagaagatggatggcaccgaggagctgctggtgaagctgaacagggaagatttgctccggaagcagaggacctttgacaacggtagcatcccccaccagatccacctgggcgagctgcacgcaatactgaggcgacaggaggatttctaccccttcctcaaggacaatagggagaaaatcgaaaagattctgaccttcaggatcccctactacgtgggccctcttgccaggggcaacagccgattcgcttggatgacaagaaagagcgaggagaccatcaccccctggaacttcgaggaagtggtggacaaaggagcaagcgcgcagtctttcatcgaacggatgaccaatttcgacaaaaacctgcctaacgagaaggtgctgcccaagcacagcctgctttacgagtacttcaccgtgtacaacgagctcaccaaggtgaaatatgtgaccgagggcatgcgaaaacccgctttcctgagcggcgagcagaagaaggccatcgtggacctgctgttcaagaccaacaggaaggtgaccgtgaagcagctgaaggaggactacttcaagaagatcgagtgctttgatagcgtggaaataagcggcgtggaggacaggttcaacgccagcctgggcacctaccacgacttgttgaagataatcaaagacaaggatttcctggataatgaggagaacgaggatatactcgaggacatcgtgctgactttgaccctgtttgaggaccgagagatgattgaagaaaggctcaaaacctacgcccacctgttcgacgacaaagtgatgaaacaactgaagagacgaagatacaccggctggggcagactgtccaggaagctcatcaacggcattagggacaagcagagcggcaagaccatcctggatttcctgaagtccgacggcttcgccaaccgaaacttcatgcagctgattcacgatgacagcttgaccttcaaggaggacatccagaaggcccaggttagcggccagggcgactccctgcacgaacatattgcaaacctggcaggctcccctgcgatcaagaagggcatactgcagaccgttaaggttgtggacgaattggtcaaggtcatgggcaggcacaagcccgaaaacatagttatagagatggccagagagaaccagaccacccaaaagggccagaagaacagccgggagcgcatgaaaaggatcgaggagggtatcaaggaactcggaagccagatcctcaaagagcaccccgtggagaatacccagctccagaacgagaagctgtacctgtactacctgcagaacggcagggacatgtacgttgaccaggagttggacatcaacaggctttcagactatgacgtggatcacatagtgccccagagctttcttaaagacgatagcatcgacaacaaggtcctgacccgctccgacaaaaacaggggcaaaagcgacaacgtgccaagcgaagaggtggttaaaaagatgaagaactactggaggcaactgctcaacgcgaaattgatcacccagagaaagttcgataacctgaccaaggccgagaggggcggactctccgaacttgacaaagcgggcttcataaagaggcagctggtcgagacccgacagatcacgaagcacgtggcccaaatcctcgacagcagaatgaataccaagtacgatgagaatgacaaactcatcagggaagtgaaagtgattaccctgaagagcaagttggtgtccgactttcgcaaagatttccagttctacaaggtgagggagatcaacaactaccaccatgcccacgacgcatacctgaacgccgtggtcggcaccgccctgattaagaagtatccaaagctggagtccgaatttgtctacggcgactacaaagtttacgatgtgaggaagatgatcgctaagagcgaacaggagatcggcaaggccaccgctaagtatttcttctacagcaacatcatgaactttttcaagaccgagatcacacttgccaacggcgaaatcaggaagaggccgcttatcgagaccaacggtgagaccggcgagatcgtgtgggacaagggcagggacttcgccaccgtgaggaaagtcctgagcatgccccaggtgaatattgtgaaaaaaactgaggtgcagacaggcggctttagcaaggaatccatcctgcccaagaggaacagcgacaagctgatcgcccggaagaaggactgggaccctaagaagtatggaggcttcgacagccccaccgtagcctacagcgtgctggtggtcgcgaaggtagagaaggggaagagcaagaaactgaagagcgtgaaggagctgctcggcataaccatcatggagaggtccagctttgagaagaaccccattgactttttggaagccaagggctacaaagaggtcaaaaaggacctgatcatcaaactccccaagtactccctgtttgaattggagaacggcagaaagaggatgctggcgagcgctggggaactgcaaaagggcaacgaactggcgctgcccagcaagtacgtgaattttctgtacctggcgtcccactacgaaaagctgaaaggcagccccgaggacaacgagcagaagcagctgttcgtggagcagcacaagcattacctggacgagataatcgagcaaatcagcgagttcagcaagagggtgattctggccgacgcgaacctggataaggtcctcagcgcctacaacaagcaccgagacaaacccatcagggagcaggccgagaatatcatacacctgttcaccctgacaaatctgggcgcacctgcggcattcaaatacttcgataccaccatcgacaggaaaaggtacactagcactaaggaggtgctggatgccaccttgatccaccagtccattaccggcctgtatgagaccaggatcgacctgagccagcttggaggcgactctagggcggacccaaaaaagaaaaggaaggtggaattcgctggagacatgagagctgccaacctttggccaagcccgctcatgatcaaacgctctaagaagaacagcctggccttgtccctgacggccgaccagatggtcagtgccttgttggatgctgagccccccatactctattccgagtatgatcctaccagacccttcagtgaagcttcgatgatgggcttactgaccaacctggcagacagggagctggttcacatgatcaactgggcgaagagggtgccaggctttgtggatttgaccctccatgatcaggtccaccttcttgaatgtgcctggctagagatcctgatgattggtctcgtctggcgctccatggagcacccagtgaagctactgtttgctcctaacttgctcttggacaggaaccagggaaaatgtgtagagggcatggtggagatcttcgacatgctgctggctacatcatctcggttccgcatgatgaatctgcagggagaggagtttgtgtgcctcaaatctattattttgcttaattctggagtgtacacatttctgtccagcaccctgaagtctctggaagagaaggaccatatccaccgagtcctggacaagatcacagacactttgatccacctgatggccaaggcaggcctgaccctgcagcagcagcaccagcggctggcccagctcctcctcatcctctcccacatcaggcacatgagtaacaaaggcatggagcatctgtacagcatgaagtgcaagaacgtggtgcccctctatgacctgctgctggaggcggcggacgcccaccgcctacatgcgcccactagccgtggaggggcatccgtggaggagacggaccaaagccacttggccactgcgggctctacttcatcgcattccttgcaaaagtattacatcacgggggaggcagagggtttccctgccacagcttctagaggcagtggagagggcagaggaagtctgctaacatgcggtgacgtcgaggagaatcctggcccaatgaacctgagcaaaaacgtgagcgtgagcgtgtatatgaaggggaacgtcaacaatcatgagtttgagtacgacggggaaggtggtggtgatccttatacaggtaaatattccatgaagatgacgctacgtggtcaaaattccctacccttttcctatgatatcattaccacggcatttcagtatggtttccgcgtatttacaaaataccctgagggaattgttgactattttaaggactcgcttcccgacgcattccagtggaacagacgaattgtgtttgaagatggtggagtactaaacatgagcagtgatatcacatataaagataatgttctgcatggtgacgtcaaggctgagggagtgaacttcccgccgaatgggccagtgatgaagaatgaaattgtgatggaggaaccgactgaagaaacatttactccaaaaaacggggttcttgttggcttttgtcccaaagcgtacttacttaaagacggttcctattactatggaaatatgacaacattttacagatccaagaaatctggccaggcacctcctgggtatcactttgttaagcatcgtctcgtcaagaccaatgtgggacatggatttaagacggttgagcagactgaatatgccactgctcatgtcagtgatcttcccaagttcgaagcttga

SEQ ID NO: 47 - DNA, 6888 bp, Artificial sequence
  cloned, variant sequence 3
atgggcaagcccatccctaaccccctgttggggctggacagcaccgctcccaaaaagaaaaggaaggtgggcattcacggcgtgcctgcggccaccggtgctggagacatgagagctgccaacctttggccaagcccgctcatgatcaaacgctctaagaagaacagcctggccttgtccctgacggccgaccagatggtcagtgccttgttggatgctgagccccccatactctattccgagtatgatcctaccagacccttcagtgaagcttcgatgatgggcttactgaccaacctggcagacagggagctggttcacatgatcaactgggcgaagagggtgccaggctttgtggatttgaccctccatgatcaggtccaccttcttgaatgtgcctggctagagatcctgatgattggtctcgtctggcgctccatggagcacccagtgaagctactgtttgctcctaacttgctcttggacaggaaccagggaaaatgtgtagagggcatggtggagatcttcgacatgctgctggctacatcatctcggttccgcatgatgaatctgcagggagaggagtttgtgtgcctcaaatctattattttgcttaattctggagtgtacacatttctgtccagcaccctgaagtctctggaagagaaggaccatatccaccgagtcctggacaagatcacagacactttgatccacctgatggccaaggcaggcctgaccctgcagcagcagcaccagcggctggcccagctcctcctcatcctctcccacatcaggcacatgagtaacaaaggcatggagcatctgtacagcatgaagtgcaagaacgtggtgcccctctatgacctgctgctggaggcggcggacgcccaccgcctacatgcgcccactagccgtggaggggcatccgtggaggagacggaccaaagccacttggccactgcgggctctacttcatcgcattccttgcaaaagtattacatcacgggggaggcagagggtttccctgccacagctggtggctctggaggtagcggcgccgacaaaaagtacagcatcggccttgatatcggcaccaatagcgtgggctgggccgttatcacagacgaatacaaggtacccagcaagaagttcaaggtgctggggaatacagacaggcactctatcaagaaaaaccttatcggggctctgctgtttgactcaggcgagaccgccgaggccaccaggttgaagaggaccgcaaggcgaaggtacacccggaggaagaacaggatctgctatctgcaggagatcttcagcaacgagatggccaaggtggacgacagcttcttccacaggctggaggagagcttccttgtcgaggaggataagaagcacgaacgacaccccatcttcggcaacatagtcgacgaggtcgcttatcacgagaagtaccccaccatctaccacctgcgaaagaaattggtggatagcaccgataaagccgacttgcgacttatctacttggctctggcgcacatgattaagttcaggggccacttcctgatcgagggcgaccttaaccccgacaacagtgacgtagacaaattgttcatccagcttgtacagacctataaccagctgttcgaggaaaaccctattaacgccagcggggtggatgcgaaggccatacttagcgccaggctgagcaaaagcaggcgcttggagaacctgatagcccagctgcccggtgaaaagaagaacggcctcttcggtaatctgattgccctgagcctgggcctgacccccaacttcaagagcaacttcgacctggcagaagatgccaagctgcagttgagtaaggacacctatgacgacgacttggacaatctgctcgcccaaatcggcgaccagtacgctgacctgttcctcgccgccaagaacctttctgacgcaatcctgcttagcgatatccttagggtgaacacagagatcaccaaggcccccctgagcgccagcatgatcaagaggtacgacgagcaccatcaggacctgacccttctgaaggccctggtgaggcagcaactgcccgagaagtacaaggagatctttttcgaccagagcaagaacggctacgccggctacatcgacggcggagccagccaagaggagttctacaagttcatcaagcccatcctggagaagatggatggcaccgaggagctgctggtgaagctgaacagggaagatttgctccggaagcagaggacctttgacaacggtagcatcccccaccagatccacctgggcgagctgcacgcaatactgaggcgacaggaggatttctaccccttcctcaaggacaatagggagaaaatcgaaaagattctgaccttcaggatcccctactacgtgggccctcttgccaggggcaacagccgattcgcttggatgacaagaaagagcgaggagaccatcaccccctggaacttcgaggaagtggtggacaaaggagcaagcgcgcagtctttcatcgaacggatgaccaatttcgacaaaaacctgcctaacgagaaggtgctgcccaagcacagcctgctttacgagtacttcaccgtgtacaacgagctcaccaaggtgaaatatgtgaccgagggcatgcgaaaacccgctttcctgagcggcgagcagaagaaggccatcgtggacctgctgttcaagaccaacaggaaggtgaccgtgaagcagctgaaggaggactacttcaagaagatcgagtgctttgatagcgtggaaataagcggcgtggaggacaggttcaacgccagcctgggcacctaccacgacttgttgaagataatcaaagacaaggatttcctggataatgaggagaacgaggatatactcgaggacatcgtgctgactttgaccctgtttgaggaccgagagatgattgaagaaaggctcaaaacctacgcccacctgttcgacgacaaagtgatgaaacaactgaagagacgaagatacaccggctggggcagactgtccaggaagctcatcaacggcattagggacaagcagagcggcaagaccatcctggatttcctgaagtccgacggcttcgccaaccgaaacttcatgcagctgattcacgatgacagcttgaccttcaaggaggacatccagaaggcccaggttagcggccagggcgactccctgcacgaacatattgcaaacctggcaggctcccctgcgatcaagaagggcatactgcagaccgttaaggttgtggacgaattggtcaaggtcatgggcaggcacaagcccgaaaacatagttatagagatggccagagagaaccagaccacccaaaagggccagaagaacagccgggagcgcatgaaaaggatcgaggagggtatcaaggaactcggaagccagatcctcaaagagcaccccgtggagaatacccagctccagaacgagaagctgtacctgtactacctgcagaacggcagggacatgtacgttgaccaggagttggacatcaacaggctttcagactatgacgtggatcacatagtgccccagagctttcttaaagacgatagcatcgacaacaaggtcctgacccgctccgacaaaaacaggggcaaaagcgacaacgtgccaagcgaagaggtggttaaaaagatgaagaactactggaggcaactgctcaacgcgaaattgatcacccagagaaagttcgataacctgaccaaggccgagaggggcggactctccgaacttgacaaagcgggcttcataaagaggcagctggtcgagacccgacagatcacgaagcacgtggcccaaatcctcgacagcagaatgaataccaagtacgatgagaatgacaaactcatcagggaagtgaaagtgattaccctgaagagcaagttggtgtccgactttcgcaaagatttccagttctacaaggtgagggagatcaacaactaccaccatgcccacgacgcatacctgaacgccgtggtcggcaccgccctgattaagaagtatccaaagctggagtccgaatttgtctacggcgactacaaagtttacgatgtgaggaagatgatcgctaagagcgaacaggagatcggcaaggccaccgctaagtatttcttctacagcaacatcatgaactttttcaagaccgagatcacacttgccaacggcgaaatcaggaagaggccgcttatcgagaccaacggtgagaccggcgagatcgtgtgggacaagggcagggacttcgccaccgtgaggaaagtcctgagcatgccccaggtgaatattgtgaaaaaaactgaggtgcagacaggcggctttagcaaggaatccatcctgcccaagaggaacagcgacaagctgatcgcccggaagaaggactgggaccctaagaagtatggaggcttcgacagccccaccgtagcctacagcgtgctggtggtcgcgaaggtagagaaggggaagagcaagaaactgaagagcgtgaaggagctgctcggcataaccatcatggagaggtccagctttgagaagaaccccattgactttttggaagccaagggctacaaagaggtcaaaaaggacctgatcatcaaactccccaagtactccctgtttgaattggagaacggcagaaagaggatgctggcgagcgctggggaactgcaaaagggcaacgaactggcgctgcccagcaagtacgtgaattttctgtacctggcgtcccactacgaaaagctgaaaggcagccccgaggacaacgagcagaagcagctgttcgtggagcagcacaagcattacctggacgagataatcgagcaaatcagcgagttcagcaagagggtgattctggccgacgcgaacctggataaggtcctcagcgcctacaacaagcaccgagacaaacccatcagggagcaggccgagaatatcatacacctgttcaccctgacaaatctgggcgcacctgcggcattcaaatacttcgataccaccatcgacaggaaaaggtacactagcactaaggaggtgctggatgccaccttgatccaccagtccattaccggcctgtatgagaccaggatcgacctgagccagcttggaggcgactctagggcggacccaaaaaagaaaaggaaggtggaattcgctggagacatgagagctgccaacctttggccaagcccgctcatgatcaaacgctctaagaagaacagcctggccttgtccctgacggccgaccagatggtcagtgccttgttggatgctgagccccccatactctattccgagtatgatcctaccagacccttcagtgaagcttcgatgatgggcttactgaccaacctggcagacagggagctggttcacatgatcaactgggcgaagagggtgccaggctttgtggatttgaccctccatgatcaggtccaccttcttgaatgtgcctggctagagatcctgatgattggtctcgtctggcgctccatggagcacccagtgaagctactgtttgctcctaacttgctcttggacaggaaccagggaaaatgtgtagagggcatggtggagatcttcgacatgctgctggctacatcatctcggttccgcatgatgaatctgcagggagaggagtttgtgtgcctcaaatctattattttgcttaattctggagtgtacacatttctgtccagcaccctgaagtctctggaagagaaggaccatatccaccgagtcctggacaagatcacagacactttgatccacctgatggccaaggcaggcctgaccctgcagcagcagcaccagcggctggcccagctcctcctcatcctctcccacatcaggcacatgagtaacaaaggcatggagcatctgtacagcatgaagtgcaagaacgtggtgcccctctatgacctgctgctggaggcggcggacgcccaccgcctacatgcgcccactagccgtggaggggcatccgtggaggagacggaccaaagccacttggccactgcgggctctacttcatcgcattccttgcaaaagtattacatcacgggggaggcagagggtttccctgccacagcttctagaggcagtggagagggcagaggaagtctgctaacatgcggtgacgtcgaggagaatcctggcccaatgaacctgagcaaaaacgtgagcgtgagcgtgtatatgaaggggaacgtcaacaatcatgagtttgagtacgacggggaaggtggtggtgatccttatacaggtaaatattccatgaagatgacgctacgtggtcaaaattccctacccttttcctatgatatcattaccacggcatttcagtatggtttccgcgtatttacaaaataccctgagggaattgttgactattttaaggactcgcttcccgacgcattccagtggaacagacgaattgtgtttgaagatggtggagtactaaacatgagcagtgatatcacatataaagataatgttctgcatggtgacgtcaaggctgagggagtgaacttcccgccgaatgggccagtgatgaagaatgaaattgtgatggaggaaccgactgaagaaacatttactccaaaaaacggggttcttgttggcttttgtcccaaagcgtacttacttaaagacggttcctattactatggaaatatgacaacattttacagatccaagaaatctggccaggcacctcctgggtatcactttgttaagcatcgtctcgtcaagaccaatgtgggacatggatttaagacggttgagcagactgaatatgccactgctcatgtcagtgatcttcccaagttcgaagcttga

SEQ ID NO: 48 - DNA, 6903 bp, Artificial sequence
  cloned, variant sequence 4
atgggcaagcccatccctaaccccctgttggggctggacagcaccgctcccaaaaagaaaaggaaggtgggcattcacggcgtgcctgcggccaccggtgctggagacatgagagctgccaacctttggccaagcccgctcatgatcaaacgctctaagaagaacagcctggccttgtccctgacggccgaccagatggtcagtgccttgttggatgctgagccccccatactctattccgagtatgatcctaccagacccttcagtgaagcttcgatgatgggcttactgaccaacctggcagacagggagctggttcacatgatcaactgggcgaagagggtgccaggctttgtggatttgaccctccatgatcaggtccaccttcttgaatgtgcctggctagagatcctgatgattggtctcgtctggcgctccatggagcacccagtgaagctactgtttgctcctaacttgctcttggacaggaaccagggaaaatgtgtagagggcatggtggagatcttcgacatgctgctggctacatcatctcggttccgcatgatgaatctgcagggagaggagtttgtgtgcctcaaatctattattttgcttaattctggagtgtacacatttctgtccagcaccctgaagtctctggaagagaaggaccatatccaccgagtcctggacaagatcacagacactttgatccacctgatggccaaggcaggcctgaccctgcagcagcagcaccagcggctggcccagctcctcctcatcctctcccacatcaggcacatgagtaacaaaggcatggagcatctgtacagcatgaagtgcaagaacgtggtgcccctctatgacctgctgctggaggcggcggacgcccaccgcctacatgcgcccactagccgtggaggggcatccgtggaggagacggaccaaagccacttggccactgcgggctctacttcatcgcattccttgcaaaagtattacatcacgggggaggcagagggtttccctgccacagctgggacctcagagtccgccacaccagaatcgggcggcgccgacaaaaagtacagcatcggccttgatatcggcaccaatagcgtgggctgggccgttatcacagacgaatacaaggtacccagcaagaagttcaaggtgctggggaatacagacaggcactctatcaagaaaaaccttatcggggctctgctgtttgactcaggcgagaccgccgaggccaccaggttgaagaggaccgcaaggcgaaggtacacccggaggaagaacaggatctgctatctgcaggagatcttcagcaacgagatggccaaggtggacgacagcttcttccacaggctggaggagagcttccttgtcgaggaggataagaagcacgaacgacaccccatcttcggcaacatagtcgacgaggtcgcttatcacgagaagtaccccaccatctaccacctgcgaaagaaattggtggatagcaccgataaagccgacttgcgacttatctacttggctctggcgcacatgattaagttcaggggccacttcctgatcgagggcgaccttaaccccgacaacagtgacgtagacaaattgttcatccagcttgtacagacctataaccagctgttcgaggaaaaccctattaacgccagcggggtggatgcgaaggccatacttagcgccaggctgagcaaaagcaggcgcttggagaacctgatagcccagctgcccggtgaaaagaagaacggcctcttcggtaatctgattgccctgagcctgggcctgacccccaacttcaagagcaacttcgacctggcagaagatgccaagctgcagttgagtaaggacacctatgacgacgacttggacaatctgctcgcccaaatcggcgaccagtacgctgacctgttcctcgccgccaagaacctttctgacgcaatcctgcttagcgatatccttagggtgaacacagagatcaccaaggcccccctgagcgccagcatgatcaagaggtacgacgagcaccatcaggacctgacccttctgaaggccctggtgaggcagcaactgcccgagaagtacaaggagatctttttcgaccagagcaagaacggctacgccggctacatcgacggcggagccagccaagaggagttctacaagttcatcaagcccatcctggagaagatggatggcaccgaggagctgctggtgaagctgaacagggaagatttgctccggaagcagaggacctttgacaacggtagcatcccccaccagatccacctgggcgagctgcacgcaatactgaggcgacaggaggatttctaccccttcctcaaggacaatagggagaaaatcgaaaagattctgaccttcaggatcccctactacgtgggccctcttgccaggggcaacagccgattcgcttggatgacaagaaagagcgaggagaccatcaccccctggaacttcgaggaagtggtggacaaaggagcaagcgcgcagtctttcatcgaacggatgaccaatttcgacaaaaacctgcctaacgagaaggtgctgcccaagcacagcctgctttacgagtacttcaccgtgtacaacgagctcaccaaggtgaaatatgtgaccgagggcatgcgaaaacccgctttcctgagcggcgagcagaagaaggccatcgtggacctgctgttcaagaccaacaggaaggtgaccgtgaagcagctgaaggaggactacttcaagaagatcgagtgctttgatagcgtggaaataagcggcgtggaggacaggttcaacgccagcctgggcacctaccacgacttgttgaagataatcaaagacaaggatttcctggataatgaggagaacgaggatatactcgaggacatcgtgctgactttgaccctgtttgaggaccgagagatgattgaagaaaggctcaaaacctacgcccacctgttcgacgacaaagtgatgaaacaactgaagagacgaagatacaccggctggggcagactgtccaggaagctcatcaacggcattagggacaagcagagcggcaagaccatcctggatttcctgaagtccgacggcttcgccaaccgaaacttcatgcagctgattcacgatgacagcttgaccttcaaggaggacatccagaaggcccaggttagcggccagggcgactccctgcacgaacatattgcaaacctggcaggctcccctgcgatcaagaagggcatactgcagaccgttaaggttgtggacgaattggtcaaggtcatgggcaggcacaagcccgaaaacatagttatagagatggccagagagaaccagaccacccaaaagggccagaagaacagccgggagcgcatgaaaaggatcgaggagggtatcaaggaactcggaagccagatcctcaaagagcaccccgtggagaatacccagctccagaacgagaagctgtacctgtactacctgcagaacggcagggacatgtacgttgaccaggagttggacatcaacaggctttcagactatgacgtggatcacatagtgccccagagctttcttaaagacgatagcatcgacaacaaggtcctgacccgctccgacaaaaacaggggcaaaagcgacaacgtgccaagcgaagaggtggttaaaaagatgaagaactactggaggcaactgctcaacgcgaaattgatcacccagagaaagttcgataacctgaccaaggccgagaggggcggactctccgaacttgacaaagcgggcttcataaagaggcagctggtcgagacccgacagatcacgaagcacgtggcccaaatcctcgacagcagaatgaataccaagtacgatgagaatgacaaactcatcagggaagtgaaagtgattaccctgaagagcaagttggtgtccgactttcgcaaagatttccagttctacaaggtgagggagatcaacaactaccaccatgcccacgacgcatacctgaacgccgtggtcggcaccgccctgattaagaagtatccaaagctggagtccgaatttgtctacggcgactacaaagtttacgatgtgaggaagatgatcgctaagagcgaacaggagatcggcaaggccaccgctaagtatttcttctacagcaacatcatgaactttttcaagaccgagatcacacttgccaacggcgaaatcaggaagaggccgcttatcgagaccaacggtgagaccggcgagatcgtgtgggacaagggcagggacttcgccaccgtgaggaaagtcctgagcatgccccaggtgaatattgtgaaaaaaactgaggtgcagacaggcggctttagcaaggaatccatcctgcccaagaggaacagcgacaagctgatcgcccggaagaaggactgggaccctaagaagtatggaggcttcgacagccccaccgtagcctacagcgtgctggtggtcgcgaaggtagagaaggggaagagcaagaaactgaagagcgtgaaggagctgctcggcataaccatcatggagaggtccagctttgagaagaaccccattgactttttggaagccaagggctacaaagaggtcaaaaaggacctgatcatcaaactccccaagtactccctgtttgaattggagaacggcagaaagaggatgctggcgagcgctggggaactgcaaaagggcaacgaactggcgctgcccagcaagtacgtgaattttctgtacctggcgtcccactacgaaaagctgaaaggcagccccgaggacaacgagcagaagcagctgttcgtggagcagcacaagcattacctggacgagataatcgagcaaatcagcgagttcagcaagagggtgattctggccgacgcgaacctggataaggtcctcagcgcctacaacaagcaccgagacaaacccatcagggagcaggccgagaatatcatacacctgttcaccctgacaaatctgggcgcacctgcggcattcaaatacttcgataccaccatcgacaggaaaaggtacactagcactaaggaggtgctggatgccaccttgatccaccagtccattaccggcctgtatgagaccaggatcgacctgagccagcttggaggcgactctagggcggacccaaaaaagaaaaggaaggtggaattcgctggagacatgagagctgccaacctttggccaagcccgctcatgatcaaacgctctaagaagaacagcctggccttgtccctgacggccgaccagatggtcagtgccttgttggatgctgagccccccatactctattccgagtatgatcctaccagacccttcagtgaagcttcgatgatgggcttactgaccaacctggcagacagggagctggttcacatgatcaactgggcgaagagggtgccaggctttgtggatttgaccctccatgatcaggtccaccttcttgaatgtgcctggctagagatcctgatgattggtctcgtctggcgctccatggagcacccagtgaagctactgtttgctcctaacttgctcttggacaggaaccagggaaaatgtgtagagggcatggtggagatcttcgacatgctgctggctacatcatctcggttccgcatgatgaatctgcagggagaggagtttgtgtgcctcaaatctattattttgcttaattctggagtgtacacatttctgtccagcaccctgaagtctctggaagagaaggaccatatccaccgagtcctggacaagatcacagacactttgatccacctgatggccaaggcaggcctgaccctgcagcagcagcaccagcggctggcccagctcctcctcatcctctcccacatcaggcacatgagtaacaaaggcatggagcatctgtacagcatgaagtgcaagaacgtggtgcccctctatgacctgctgctggaggcggcggacgcccaccgcctacatgcgcccactagccgtggaggggcatccgtggaggagacggaccaaagccacttggccactgcgggctctacttcatcgcattccttgcaaaagtattacatcacgggggaggcagagggtttccctgccacagcttctagaggcagtggagagggcagaggaagtctgctaacatgcggtgacgtcgaggagaatcctggcccaatgaacctgagcaaaaacgtgagcgtgagcgtgtatatgaaggggaacgtcaacaatcatgagtttgagtacgacggggaaggtggtggtgatccttatacaggtaaatattccatgaagatgacgctacgtggtcaaaattccctacccttttcctatgatatcattaccacggcatttcagtatggtttccgcgtatttacaaaataccctgagggaattgttgactattttaaggactcgcttcccgacgcattccagtggaacagacgaattgtgtttgaagatggtggagtactaaacatgagcagtgatatcacatataaagataatgttctgcatggtgacgtcaaggctgagggagtgaacttcccgccgaatgggccagtgatgaagaatgaaattgtgatggaggaaccgactgaagaaacatttactccaaaaaacggggttcttgttggcttttgtcccaaagcgtacttacttaaagacggttcctattactatggaaatatgacaacattttacagatccaagaaatctggccaggcacctcctgggtatcactttgttaagcatcgtctcgtcaagaccaatgtgggacatggatttaagacggttgagcagactgaatatgccactgctcatgtcagtgatcttcccaagttcgaagcttga

SEQ ID NO: 49 - DNA, 6894 bp, Artificial sequence
  cloned, variant sequence 5
atgggcaagcccatccctaaccccctgttggggctggacagcaccgctcccaaaaagaaaaggaaggtgggcattcacggcgtgcctgcggccaccggtgctggagacatgagagctgccaacctttggccaagcccgctcatgatcaaacgctctaagaagaacagcctggccttgtccctgacggccgaccagatggtcagtgccttgttggatgctgagccccccatactctattccgagtatgatcctaccagacccttcagtgaagcttcgatgatgggcttactgaccaacctggcagacagggagctggttcacatgatcaactgggcgaagagggtgccaggctttgtggatttgaccctccatgatcaggtccaccttcttgaatgtgcctggctagagatcctgatgattggtctcgtctggcgctccatggagcacccagtgaagctactgtttgctcctaacttgctcttggacaggaaccagggaaaatgtgtagagggcatggtggagatcttcgacatgctgctggctacatcatctcggttccgcatgatgaatctgcagggagaggagtttgtgtgcctcaaatctattattttgcttaattctggagtgtacacatttctgtccagcaccctgaagtctctggaagagaaggaccatatccaccgagtcctggacaagatcacagacactttgatccacctgatggccaaggcaggcctgaccctgcagcagcagcaccagcggctggcccagctcctcctcatcctctcccacatcaggcacatgagtaacaaaggcatggagcatctgtacagcatgaagtgcaagaacgtggtgcccctctatgacctgctgctggaggcggcggacgcccaccgcctacatgcgcccactagccgtggaggggcatccgtggaggagacggaccaaagccacttggccactgcgggctctacttcatcgcattccttgcaaaagtattacatcacgggggaggcagagggtttccctgccacagcttccggatctgaaactcccgggaccggcgccgacaaaaagtacagcatcggccttgatatcggcaccaatagcgtgggctgggccgttatcacagacgaatacaaggtacccagcaagaagttcaaggtgctggggaatacagacaggcactctatcaagaaaaaccttatcggggctctgctgtttgactcaggcgagaccgccgaggccaccaggttgaagaggaccgcaaggcgaaggtacacccggaggaagaacaggatctgctatctgcaggagatcttcagcaacgagatggccaaggtggacgacagcttcttccacaggctggaggagagcttccttgtcgaggaggataagaagcacgaacgacaccccatcttcggcaacatagtcgacgaggtcgcttatcacgagaagtaccccaccatctaccacctgcgaaagaaattggtggatagcaccgataaagccgacttgcgacttatctacttggctctggcgcacatgattaagttcaggggccacttcctgatcgagggcgaccttaaccccgacaacagtgacgtagacaaattgttcatccagcttgtacagacctataaccagctgttcgaggaaaaccctattaacgccagcggggtggatgcgaaggccatacttagcgccaggctgagcaaaagcaggcgcttggagaacctgatagcccagctgcccggtgaaaagaagaacggcctcttcggtaatctgattgccctgagcctgggcctgacccccaacttcaagagcaacttcgacctggcagaagatgccaagctgcagttgagtaaggacacctatgacgacgacttggacaatctgctcgcccaaatcggcgaccagtacgctgacctgttcctcgccgccaagaacctttctgacgcaatcctgcttagcgatatccttagggtgaacacagagatcaccaaggcccccctgagcgccagcatgatcaagaggtacgacgagcaccatcaggacctgacccttctgaaggccctggtgaggcagcaactgcccgagaagtacaaggagatctttttcgaccagagcaagaacggctacgccggctacatcgacggcggagccagccaagaggagttctacaagttcatcaagcccatcctggagaagatggatggcaccgaggagctgctggtgaagctgaacagggaagatttgctccggaagcagaggacctttgacaacggtagcatcccccaccagatccacctgggcgagctgcacgcaatactgaggcgacaggaggatttctaccccttcctcaaggacaatagggagaaaatcgaaaagattctgaccttcaggatcccctactacgtgggccctcttgccaggggcaacagccgattcgcttggatgacaagaaagagcgaggagaccatcaccccctggaacttcgaggaagtggtggacaaaggagcaagcgcgcagtctttcatcgaacggatgaccaatttcgacaaaaacctgcctaacgagaaggtgctgcccaagcacagcctgctttacgagtacttcaccgtgtacaacgagctcaccaaggtgaaatatgtgaccgagggcatgcgaaaacccgctttcctgagcggcgagcagaagaaggccatcgtggacctgctgttcaagaccaacaggaaggtgaccgtgaagcagctgaaggaggactacttcaagaagatcgagtgctttgatagcgtggaaataagcggcgtggaggacaggttcaacgccagcctgggcacctaccacgacttgttgaagataatcaaagacaaggatttcctggataatgaggagaacgaggatatactcgaggacatcgtgctgactttgaccctgtttgaggaccgagagatgattgaagaaaggctcaaaacctacgcccacctgttcgacgacaaagtgatgaaacaactgaagagacgaagatacaccggctggggcagactgtccaggaagctcatcaacggcattagggacaagcagagcggcaagaccatcctggatttcctgaagtccgacggcttcgccaaccgaaacttcatgcagctgattcacgatgacagcttgaccttcaaggaggacatccagaaggcccaggttagcggccagggcgactccctgcacgaacatattgcaaacctggcaggctcccctgcgatcaagaagggcatactgcagaccgttaaggttgtggacgaattggtcaaggtcatgggcaggcacaagcccgaaaacatagttatagagatggccagagagaaccagaccacccaaaagggccagaagaacagccgggagcgcatgaaaaggatcgaggagggtatcaaggaactcggaagccagatcctcaaagagcaccccgtggagaatacccagctccagaacgagaagctgtacctgtactacctgcagaacggcagggacatgtacgttgaccaggagttggacatcaacaggctttcagactatgacgtggatcacatagtgccccagagctttcttaaagacgatagcatcgacaacaaggtcctgacccgctccgacaaaaacaggggcaaaagcgacaacgtgccaagcgaagaggtggttaaaaagatgaagaactactggaggcaactgctcaacgcgaaattgatcacccagagaaagttcgataacctgaccaaggccgagaggggcggactctccgaacttgacaaagcgggcttcataaagaggcagctggtcgagacccgacagatcacgaagcacgtggcccaaatcctcgacagcagaatgaataccaagtacgatgagaatgacaaactcatcagggaagtgaaagtgattaccctgaagagcaagttggtgtccgactttcgcaaagatttccagttctacaaggtgagggagatcaacaactaccaccatgcccacgacgcatacctgaacgccgtggtcggcaccgccctgattaagaagtatccaaagctggagtccgaatttgtctacggcgactacaaagtttacgatgtgaggaagatgatcgctaagagcgaacaggagatcggcaaggccaccgctaagtatttcttctacagcaacatcatgaactttttcaagaccgagatcacacttgccaacggcgaaatcaggaagaggccgcttatcgagaccaacggtgagaccggcgagatcgtgtgggacaagggcagggacttcgccaccgtgaggaaagtcctgagcatgccccaggtgaatattgtgaaaaaaactgaggtgcagacaggcggctttagcaaggaatccatcctgcccaagaggaacagcgacaagctgatcgcccggaagaaggactgggaccctaagaagtatggaggcttcgacagccccaccgtagcctacagcgtgctggtggtcgcgaaggtagagaaggggaagagcaagaaactgaagagcgtgaaggagctgctcggcataaccatcatggagaggtccagctttgagaagaaccccattgactttttggaagccaagggctacaaagaggtcaaaaaggacctgatcatcaaactccccaagtactccctgtttgaattggagaacggcagaaagaggatgctggcgagcgctggggaactgcaaaagggcaacgaactggcgctgcccagcaagtacgtgaattttctgtacctggcgtcccactacgaaaagctgaaaggcagccccgaggacaacgagcagaagcagctgttcgtggagcagcacaagcattacctggacgagataatcgagcaaatcagcgagttcagcaagagggtgattctggccgacgcgaacctggataaggtcctcagcgcctacaacaagcaccgagacaaacccatcagggagcaggccgagaatatcatacacctgttcaccctgacaaatctgggcgcacctgcggcattcaaatacttcgataccaccatcgacaggaaaaggtacactagcactaaggaggtgctggatgccaccttgatccaccagtccattaccggcctgtatgagaccaggatcgacctgagccagcttggaggcgactctagggcggacccaaaaaagaaaaggaaggtggaattcgctggagacatgagagctgccaacctttggccaagcccgctcatgatcaaacgctctaagaagaacagcctggccttgtccctgacggccgaccagatggtcagtgccttgttggatgctgagccccccatactctattccgagtatgatcctaccagacccttcagtgaagcttcgatgatgggcttactgaccaacctggcagacagggagctggttcacatgatcaactgggcgaagagggtgccaggctttgtggatttgaccctccatgatcaggtccaccttcttgaatgtgcctggctagagatcctgatgattggtctcgtctggcgctccatggagcacccagtgaagctactgtttgctcctaacttgctcttggacaggaaccagggaaaatgtgtagagggcatggtggagatcttcgacatgctgctggctacatcatctcggttccgcatgatgaatctgcagggagaggagtttgtgtgcctcaaatctattattttgcttaattctggagtgtacacatttctgtccagcaccctgaagtctctggaagagaaggaccatatccaccgagtcctggacaagatcacagacactttgatccacctgatggccaaggcaggcctgaccctgcagcagcagcaccagcggctggcccagctcctcctcatcctctcccacatcaggcacatgagtaacaaaggcatggagcatctgtacagcatgaagtgcaagaacgtggtgcccctctatgacctgctgctggaggcggcggacgcccaccgcctacatgcgcccactagccgtggaggggcatccgtggaggagacggaccaaagccacttggccactgcgggctctacttcatcgcattccttgcaaaagtattacatcacgggggaggcagagggtttccctgccacagcttctagaggcagtggagagggcagaggaagtctgctaacatgcggtgacgtcgaggagaatcctggcccaatgaacctgagcaaaaacgtgagcgtgagcgtgtatatgaaggggaacgtcaacaatcatgagtttgagtacgacggggaaggtggtggtgatccttatacaggtaaatattccatgaagatgacgctacgtggtcaaaattccctacccttttcctatgatatcattaccacggcatttcagtatggtttccgcgtatttacaaaataccctgagggaattgttgactattttaaggactcgcttcccgacgcattccagtggaacagacgaattgtgtttgaagatggtggagtactaaacatgagcagtgatatcacatataaagataatgttctgcatggtgacgtcaaggctgagggagtgaacttcccgccgaatgggccagtgatgaagaatgaaattgtgatggaggaaccgactgaagaaacatttactccaaaaaacggggttcttgttggcttttgtcccaaagcgtacttacttaaagacggttcctattactatggaaatatgacaacattttacagatccaagaaatctggccaggcacctcctgggtatcactttgttaagcatcgtctcgtcaagaccaatgtgggacatggatttaagacggttgagcagactgaatatgccactgctcatgtcagtgatcttcccaagttcgaagcttga

SEQ ID NO: 50 - DNA, 6894 bp, Artificial sequence
  cloned, variant sequence 6
atgggcaagcccatccctaaccccctgttggggctggacagcaccgctcccaaaaagaaaaggaaggtgggcattcacggcgtgcctgcggccaccggtgctggagacatgagagctgccaacctttggccaagcccgctcatgatcaaacgctctaagaagaacagcctggccttgtccctgacggccgaccagatggtcagtgccttgttggatgctgagccccccatactctattccgagtatgatcctaccagacccttcagtgaagcttcgatgatgggcttactgaccaacctggcagacagggagctggttcacatgatcaactgggcgaagagggtgccaggctttgtggatttgaccctccatgatcaggtccaccttcttgaatgtgcctggctagagatcctgatgattggtctcgtctggcgctccatggagcacccagtgaagctactgtttgctcctaacttgctcttggacaggaaccagggaaaatgtgtagagggcatggtggagatcttcgacatgctgctggctacatcatctcggttccgcatgatgaatctgcagggagaggagtttgtgtgcctcaaatctattattttgcttaattctggagtgtacacatttctgtccagcaccctgaagtctctggaagagaaggaccatatccaccgagtcctggacaagatcacagacactttgatccacctgatggccaaggcaggcctgaccctgcagcagcagcaccagcggctggcccagctcctcctcatcctctcccacatcaggcacatgagtaacaaaggcatggagcatctgtacagcatgaagtgcaagaacgtggtgcccctctatgacctgctgctggaggcggcggacgcccaccgcctacatgcgcccactagccgtggaggggcatccgtggaggagacggaccaaagccacttggccactgcgggctctacttcatcgcattccttgcaaaagtattacatcacgggggaggcagagggtttccctgccacagcttcagagtccgccacaccagaatcgggcgccgacaaaaagtacagcatcggccttgatatcggcaccaatagcgtgggctgggccgttatcacagacgaatacaaggtacccagcaagaagttcaaggtgctggggaatacagacaggcactctatcaagaaaaaccttatcggggctctgctgtttgactcaggcgagaccgccgaggccaccaggttgaagaggaccgcaaggcgaaggtacacccggaggaagaacaggatctgctatctgcaggagatcttcagcaacgagatggccaaggtggacgacagcttcttccacaggctggaggagagcttccttgtcgaggaggataagaagcacgaacgacaccccatcttcggcaacatagtcgacgaggtcgcttatcacgagaagtaccccaccatctaccacctgcgaaagaaattggtggatagcaccgataaagccgacttgcgacttatctacttggctctggcgcacatgattaagttcaggggccacttcctgatcgagggcgaccttaaccccgacaacagtgacgtagacaaattgttcatccagcttgtacagacctataaccagctgttcgaggaaaaccctattaacgccagcggggtggatgcgaaggccatacttagcgccaggctgagcaaaagcaggcgcttggagaacctgatagcccagctgcccggtgaaaagaagaacggcctcttcggtaatctgattgccctgagcctgggcctgacccccaacttcaagagcaacttcgacctggcagaagatgccaagctgcagttgagtaaggacacctatgacgacgacttggacaatctgctcgcccaaatcggcgaccagtacgctgacctgttcctcgccgccaagaacctttctgacgcaatcctgcttagcgatatccttagggtgaacacagagatcaccaaggcccccctgagcgccagcatgatcaagaggtacgacgagcaccatcaggacctgacccttctgaaggccctggtgaggcagcaactgcccgagaagtacaaggagatctttttcgaccagagcaagaacggctacgccggctacatcgacggcggagccagccaagaggagttctacaagttcatcaagcccatcctggagaagatggatggcaccgaggagctgctggtgaagctgaacagggaagatttgctccggaagcagaggacctttgacaacggtagcatcccccaccagatccacctgggcgagctgcacgcaatactgaggcgacaggaggatttctaccccttcctcaaggacaatagggagaaaatcgaaaagattctgaccttcaggatcccctactacgtgggccctcttgccaggggcaacagccgattcgcttggatgacaagaaagagcgaggagaccatcaccccctggaacttcgaggaagtggtggacaaaggagcaagcgcgcagtctttcatcgaacggatgaccaatttcgacaaaaacctgcctaacgagaaggtgctgcccaagcacagcctgctttacgagtacttcaccgtgtacaacgagctcaccaaggtgaaatatgtgaccgagggcatgcgaaaacccgctttcctgagcggcgagcagaagaaggccatcgtggacctgctgttcaagaccaacaggaaggtgaccgtgaagcagctgaaggaggactacttcaagaagatcgagtgctttgatagcgtggaaataagcggcgtggaggacaggttcaacgccagcctgggcacctaccacgacttgttgaagataatcaaagacaaggatttcctggataatgaggagaacgaggatatactcgaggacatcgtgctgactttgaccctgtttgaggaccgagagatgattgaagaaaggctcaaaacctacgcccacctgttcgacgacaaagtgatgaaacaactgaagagacgaagatacaccggctggggcagactgtccaggaagctcatcaacggcattagggacaagcagagcggcaagaccatcctggatttcctgaagtccgacggcttcgccaaccgaaacttcatgcagctgattcacgatgacagcttgaccttcaaggaggacatccagaaggcccaggttagcggccagggcgactccctgcacgaacatattgcaaacctggcaggctcccctgcgatcaagaagggcatactgcagaccgttaaggttgtggacgaattggtcaaggtcatgggcaggcacaagcccgaaaacatagttatagagatggccagagagaaccagaccacccaaaagggccagaagaacagccgggagcgcatgaaaaggatcgaggagggtatcaaggaactcggaagccagatcctcaaagagcaccccgtggagaatacccagctccagaacgagaagctgtacctgtactacctgcagaacggcagggacatgtacgttgaccaggagttggacatcaacaggctttcagactatgacgtggatcacatagtgccccagagctttcttaaagacgatagcatcgacaacaaggtcctgacccgctccgacaaaaacaggggcaaaagcgacaacgtgccaagcgaagaggtggttaaaaagatgaagaactactggaggcaactgctcaacgcgaaattgatcacccagagaaagttcgataacctgaccaaggccgagaggggcggactctccgaacttgacaaagcgggcttcataaagaggcagctggtcgagacccgacagatcacgaagcacgtggcccaaatcctcgacagcagaatgaataccaagtacgatgagaatgacaaactcatcagggaagtgaaagtgattaccctgaagagcaagttggtgtccgactttcgcaaagatttccagttctacaaggtgagggagatcaacaactaccaccatgcccacgacgcatacctgaacgccgtggtcggcaccgccctgattaagaagtatccaaagctggagtccgaatttgtctacggcgactacaaagtttacgatgtgaggaagatgatcgctaagagcgaacaggagatcggcaaggccaccgctaagtatttcttctacagcaacatcatgaactttttcaagaccgagatcacacttgccaacggcgaaatcaggaagaggccgcttatcgagaccaacggtgagaccggcgagatcgtgtgggacaagggcagggacttcgccaccgtgaggaaagtcctgagcatgccccaggtgaatattgtgaaaaaaactgaggtgcagacaggcggctttagcaaggaatccatcctgcccaagaggaacagcgacaagctgatcgcccggaagaaggactgggaccctaagaagtatggaggcttcgacagccccaccgtagcctacagcgtgctggtggtcgcgaaggtagagaaggggaagagcaagaaactgaagagcgtgaaggagctgctcggcataaccatcatggagaggtccagctttgagaagaaccccattgactttttggaagccaagggctacaaagaggtcaaaaaggacctgatcatcaaactccccaagtactccctgtttgaattggagaacggcagaaagaggatgctggcgagcgctggggaactgcaaaagggcaacgaactggcgctgcccagcaagtacgtgaattttctgtacctggcgtcccactacgaaaagctgaaaggcagccccgaggacaacgagcagaagcagctgttcgtggagcagcacaagcattacctggacgagataatcgagcaaatcagcgagttcagcaagagggtgattctggccgacgcgaacctggataaggtcctcagcgcctacaacaagcaccgagacaaacccatcagggagcaggccgagaatatcatacacctgttcaccctgacaaatctgggcgcacctgcggcattcaaatacttcgataccaccatcgacaggaaaaggtacactagcactaaggaggtgctggatgccaccttgatccaccagtccattaccggcctgtatgagaccaggatcgacctgagccagcttggaggcgactctagggcggacccaaaaaagaaaaggaaggtggaattcgctggagacatgagagctgccaacctttggccaagcccgctcatgatcaaacgctctaagaagaacagcctggccttgtccctgacggccgaccagatggtcagtgccttgttggatgctgagccccccatactctattccgagtatgatcctaccagacccttcagtgaagcttcgatgatgggcttactgaccaacctggcagacagggagctggttcacatgatcaactgggcgaagagggtgccaggctttgtggatttgaccctccatgatcaggtccaccttcttgaatgtgcctggctagagatcctgatgattggtctcgtctggcgctccatggagcacccagtgaagctactgtttgctcctaacttgctcttggacaggaaccagggaaaatgtgtagagggcatggtggagatcttcgacatgctgctggctacatcatctcggttccgcatgatgaatctgcagggagaggagtttgtgtgcctcaaatctattattttgcttaattctggagtgtacacatttctgtccagcaccctgaagtctctggaagagaaggaccatatccaccgagtcctggacaagatcacagacactttgatccacctgatggccaaggcaggcctgaccctgcagcagcagcaccagcggctggcccagctcctcctcatcctctcccacatcaggcacatgagtaacaaaggcatggagcatctgtacagcatgaagtgcaagaacgtggtgcccctctatgacctgctgctggaggcggcggacgcccaccgcctacatgcgcccactagccgtggaggggcatccgtggaggagacggaccaaagccacttggccactgcgggctctacttcatcgcattccttgcaaaagtattacatcacgggggaggcagagggtttccctgccacagcttctagaggcagtggagagggcagaggaagtctgctaacatgcggtgacgtcgaggagaatcctggcccaatgaacctgagcaaaaacgtgagcgtgagcgtgtatatgaaggggaacgtcaacaatcatgagtttgagtacgacggggaaggtggtggtgatccttatacaggtaaatattccatgaagatgacgctacgtggtcaaaattccctacccttttcctatgatatcattaccacggcatttcagtatggtttccgcgtatttacaaaataccctgagggaattgttgactattttaaggactcgcttcccgacgcattccagtggaacagacgaattgtgtttgaagatggtggagtactaaacatgagcagtgatatcacatataaagataatgttctgcatggtgacgtcaaggctgagggagtgaacttcccgccgaatgggccagtgatgaagaatgaaattgtgatggaggaaccgactgaagaaacatttactccaaaaaacggggttcttgttggcttttgtcccaaagcgtacttacttaaagacggttcctattactatggaaatatgacaacattttacagatccaagaaatctggccaggcacctcctgggtatcactttgttaagcatcgtctcgtcaagaccaatgtgggacatggatttaagacggttgagcagactgaatatgccactgctcatgtcagtgatcttcccaagttcgaagcttga

SEQ ID NO: 51 - DNA, 6903 bp, Artificial sequence
  cloned, variant sequence 7
atgggcaagcccatccctaaccccctgttggggctggacagcaccgctcccaaaaagaaaaggaaggtgggcattcacggcgtgcctgcggccaccggtggaggatctgctggagacatgagagctgccaacctttggccaagcccgctcatgatcaaacgctctaagaagaacagcctggccttgtccctgacggccgaccagatggtcagtgccttgttggatgctgagccccccatactctattccgagtatgatcctaccagacccttcagtgaagcttcgatgatgggcttactgaccaacctggcagacagggagctggttcacatgatcaactgggcgaagagggtgccaggctttgtggatttgaccctccatgatcaggtccaccttcttgaatgtgcctggctagagatcctgatgattggtctcgtctggcgctccatggagcacccagtgaagctactgtttgctcctaacttgctcttggacaggaaccagggaaaatgtgtagagggcatggtggagatcttcgacatgctgctggctacatcatctcggttccgcatgatgaatctgcagggagaggagtttgtgtgcctcaaatctattattttgcttaattctggagtgtacacatttctgtccagcaccctgaagtctctggaagagaaggaccatatccaccgagtcctggacaagatcacagacactttgatccacctgatggccaaggcaggcctgaccctgcagcagcagcaccagcggctggcccagctcctcctcatcctctcccacatcaggcacatgagtaacaaaggcatggagcatctgtacagcatgaagtgcaagaacgtggtgcccctctatgacctgctgctggaggcggcggacgcccaccgcctacatgcgcccactagccgtggaggggcatccgtggaggagacggaccaaagccacttggccactgcgggctctacttcatcgcattccttgcaaaagtattacatcacgggggaggcagagggtttccctgccacagcttccggatctgaaactcccgggaccggcgccgacaaaaagtacagcatcggccttgatatcggcaccaatagcgtgggctgggccgttatcacagacgaatacaaggtacccagcaagaagttcaaggtgctggggaatacagacaggcactctatcaagaaaaaccttatcggggctctgctgtttgactcaggcgagaccgccgaggccaccaggttgaagaggaccgcaaggcgaaggtacacccggaggaagaacaggatctgctatctgcaggagatcttcagcaacgagatggccaaggtggacgacagcttcttccacaggctggaggagagcttccttgtcgaggaggataagaagcacgaacgacaccccatcttcggcaacatagtcgacgaggtcgcttatcacgagaagtaccccaccatctaccacctgcgaaagaaattggtggatagcaccgataaagccgacttgcgacttatctacttggctctggcgcacatgattaagttcaggggccacttcctgatcgagggcgaccttaaccccgacaacagtgacgtagacaaattgttcatccagcttgtacagacctataaccagctgttcgaggaaaaccctattaacgccagcggggtggatgcgaaggccatacttagcgccaggctgagcaaaagcaggcgcttggagaacctgatagcccagctgcccggtgaaaagaagaacggcctcttcggtaatctgattgccctgagcctgggcctgacccccaacttcaagagcaacttcgacctggcagaagatgccaagctgcagttgagtaaggacacctatgacgacgacttggacaatctgctcgcccaaatcggcgaccagtacgctgacctgttcctcgccgccaagaacctttctgacgcaatcctgcttagcgatatccttagggtgaacacagagatcaccaaggcccccctgagcgccagcatgatcaagaggtacgacgagcaccatcaggacctgacccttctgaaggccctggtgaggcagcaactgcccgagaagtacaaggagatctttttcgaccagagcaagaacggctacgccggctacatcgacggcggagccagccaagaggagttctacaagttcatcaagcccatcctggagaagatggatggcaccgaggagctgctggtgaagctgaacagggaagatttgctccggaagcagaggacctttgacaacggtagcatcccccaccagatccacctgggcgagctgcacgcaatactgaggcgacaggaggatttctaccccttcctcaaggacaatagggagaaaatcgaaaagattctgaccttcaggatcccctactacgtgggccctcttgccaggggcaacagccgattcgcttggatgacaagaaagagcgaggagaccatcaccccctggaacttcgaggaagtggtggacaaaggagcaagcgcgcagtctttcatcgaacggatgaccaatttcgacaaaaacctgcctaacgagaaggtgctgcccaagcacagcctgctttacgagtacttcaccgtgtacaacgagctcaccaaggtgaaatatgtgaccgagggcatgcgaaaacccgctttcctgagcggcgagcagaagaaggccatcgtggacctgctgttcaagaccaacaggaaggtgaccgtgaagcagctgaaggaggactacttcaagaagatcgagtgctttgatagcgtggaaataagcggcgtggaggacaggttcaacgccagcctgggcacctaccacgacttgttgaagataatcaaagacaaggatttcctggataatgaggagaacgaggatatactcgaggacatcgtgctgactttgaccctgtttgaggaccgagagatgattgaagaaaggctcaaaacctacgcccacctgttcgacgacaaagtgatgaaacaactgaagagacgaagatacaccggctggggcagactgtccaggaagctcatcaacggcattagggacaagcagagcggcaagaccatcctggatttcctgaagtccgacggcttcgccaaccgaaacttcatgcagctgattcacgatgacagcttgaccttcaaggaggacatccagaaggcccaggttagcggccagggcgactccctgcacgaacatattgcaaacctggcaggctcccctgcgatcaagaagggcatactgcagaccgttaaggttgtggacgaattggtcaaggtcatgggcaggcacaagcccgaaaacatagttatagagatggccagagagaaccagaccacccaaaagggccagaagaacagccgggagcgcatgaaaaggatcgaggagggtatcaaggaactcggaagccagatcctcaaagagcaccccgtggagaatacccagctccagaacgagaagctgtacctgtactacctgcagaacggcagggacatgtacgttgaccaggagttggacatcaacaggctttcagactatgacgtggatcacatagtgccccagagctttcttaaagacgatagcatcgacaacaaggtcctgacccgctccgacaaaaacaggggcaaaagcgacaacgtgccaagcgaagaggtggttaaaaagatgaagaactactggaggcaactgctcaacgcgaaattgatcacccagagaaagttcgataacctgaccaaggccgagaggggcggactctccgaacttgacaaagcgggcttcataaagaggcagctggtcgagacccgacagatcacgaagcacgtggcccaaatcctcgacagcagaatgaataccaagtacgatgagaatgacaaactcatcagggaagtgaaagtgattaccctgaagagcaagttggtgtccgactttcgcaaagatttccagttctacaaggtgagggagatcaacaactaccaccatgcccacgacgcatacctgaacgccgtggtcggcaccgccctgattaagaagtatccaaagctggagtccgaatttgtctacggcgactacaaagtttacgatgtgaggaagatgatcgctaagagcgaacaggagatcggcaaggccaccgctaagtatttcttctacagcaacatcatgaactttttcaagaccgagatcacacttgccaacggcgaaatcaggaagaggccgcttatcgagaccaacggtgagaccggcgagatcgtgtgggacaagggcagggacttcgccaccgtgaggaaagtcctgagcatgccccaggtgaatattgtgaaaaaaactgaggtgcagacaggcggctttagcaaggaatccatcctgcccaagaggaacagcgacaagctgatcgcccggaagaaggactgggaccctaagaagtatggaggcttcgacagccccaccgtagcctacagcgtgctggtggtcgcgaaggtagagaaggggaagagcaagaaactgaagagcgtgaaggagctgctcggcataaccatcatggagaggtccagctttgagaagaaccccattgactttttggaagccaagggctacaaagaggtcaaaaaggacctgatcatcaaactccccaagtactccctgtttgaattggagaacggcagaaagaggatgctggcgagcgctggggaactgcaaaagggcaacgaactggcgctgcccagcaagtacgtgaattttctgtacctggcgtcccactacgaaaagctgaaaggcagccccgaggacaacgagcagaagcagctgttcgtggagcagcacaagcattacctggacgagataatcgagcaaatcagcgagttcagcaagagggtgattctggccgacgcgaacctggataaggtcctcagcgcctacaacaagcaccgagacaaacccatcagggagcaggccgagaatatcatacacctgttcaccctgacaaatctgggcgcacctgcggcattcaaatacttcgataccaccatcgacaggaaaaggtacactagcactaaggaggtgctggatgccaccttgatccaccagtccattaccggcctgtatgagaccaggatcgacctgagccagcttggaggcgactctagggcggacccaaaaaagaaaaggaaggtggaattcgctggagacatgagagctgccaacctttggccaagcccgctcatgatcaaacgctctaagaagaacagcctggccttgtccctgacggccgaccagatggtcagtgccttgttggatgctgagccccccatactctattccgagtatgatcctaccagacccttcagtgaagcttcgatgatgggcttactgaccaacctggcagacagggagctggttcacatgatcaactgggcgaagagggtgccaggctttgtggatttgaccctccatgatcaggtccaccttcttgaatgtgcctggctagagatcctgatgattggtctcgtctggcgctccatggagcacccagtgaagctactgtttgctcctaacttgctcttggacaggaaccagggaaaatgtgtagagggcatggtggagatcttcgacatgctgctggctacatcatctcggttccgcatgatgaatctgcagggagaggagtttgtgtgcctcaaatctattattttgcttaattctggagtgtacacatttctgtccagcaccctgaagtctctggaagagaaggaccatatccaccgagtcctggacaagatcacagacactttgatccacctgatggccaaggcaggcctgaccctgcagcagcagcaccagcggctggcccagctcctcctcatcctctcccacatcaggcacatgagtaacaaaggcatggagcatctgtacagcatgaagtgcaagaacgtggtgcccctctatgacctgctgctggaggcggcggacgcccaccgcctacatgcgcccactagccgtggaggggcatccgtggaggagacggaccaaagccacttggccactgcgggctctacttcatcgcattccttgcaaaagtattacatcacgggggaggcagagggtttccctgccacagcttctagaggcagtggagagggcagaggaagtctgctaacatgcggtgacgtcgaggagaatcctggcccaatgaacctgagcaaaaacgtgagcgtgagcgtgtatatgaaggggaacgtcaacaatcatgagtttgagtacgacggggaaggtggtggtgatccttatacaggtaaatattccatgaagatgacgctacgtggtcaaaattccctacccttttcctatgatatcattaccacggcatttcagtatggtttccgcgtatttacaaaataccctgagggaattgttgactattttaaggactcgcttcccgacgcattccagtggaacagacgaattgtgtttgaagatggtggagtactaaacatgagcagtgatatcacatataaagataatgttctgcatggtgacgtcaaggctgagggagtgaacttcccgccgaatgggccagtgatgaagaatgaaattgtgatggaggaaccgactgaagaaacatttactccaaaaaacggggttcttgttggcttttgtcccaaagcgtacttacttaaagacggttcctattactatggaaatatgacaacattttacagatccaagaaatctggccaggcacctcctgggtatcactttgttaagcatcgtctcgtcaagaccaatgtgggacatggatttaagacggttgagcagactgaatatgccactgctcatgtcagtgatcttcccaagttcgaagcttga

SEQ ID NO: 52 - DNA, 6909 bp, Artificial sequence
  cloned, variant sequence 8
atgggcaagcccatccctaaccccctgttggggctggacagcaccgctcccaaaaagaaaaggaaggtgggcattcacggcgtgcctgcggccaccggtggaggctctgctggagacatgagagctgccaacctttggccaagcccgctcatgatcaaacgctctaagaagaacagcctggccttgtccctgacggccgaccagatggtcagtgccttgttggatgctgagccccccatactctattccgagtatgatcctaccagacccttcagtgaagcttcgatgatgggcttactgaccaacctggcagacagggagctggttcacatgatcaactgggcgaagagggtgccaggctttgtggatttgaccctccatgatcaggtccaccttcttgaatgtgcctggctagagatcctgatgattggtctcgtctggcgctccatggagcacccagtgaagctactgtttgctcctaacttgctcttggacaggaaccagggaaaatgtgtagagggcatggtggagatcttcgacatgctgctggctacatcatctcggttccgcatgatgaatctgcagggagaggagtttgtgtgcctcaaatctattattttgcttaattctggagtgtacacatttctgtccagcaccctgaagtctctggaagagaaggaccatatccaccgagtcctggacaagatcacagacactttgatccacctgatggccaaggcaggcctgaccctgcagcagcagcaccagcggctggcccagctcctcctcatcctctcccacatcaggcacatgagtaacaaaggcatggagcatctgtacagcatgaagtgcaagaacgtggtgcccctctatgacctgctgctggaggcggcggacgcccaccgcctacatgcgcccactagccgtggaggggcatccgtggaggagacggaccaaagccacttggccactgcgggctctacttcatcgcattccttgcaaaagtattacatcacgggggaggcagagggtttccctgccacagcttccggatctgaaactcccgggacccccgggggcgccgacaaaaagtacagcatcggccttgatatcggcaccaatagcgtgggctgggccgttatcacagacgaatacaaggtacccagcaagaagttcaaggtgctggggaatacagacaggcactctatcaagaaaaaccttatcggggctctgctgtttgactcaggcgagaccgccgaggccaccaggttgaagaggaccgcaaggcgaaggtacacccggaggaagaacaggatctgctatctgcaggagatcttcagcaacgagatggccaaggtggacgacagcttcttccacaggctggaggagagcttccttgtcgaggaggataagaagcacgaacgacaccccatcttcggcaacatagtcgacgaggtcgcttatcacgagaagtaccccaccatctaccacctgcgaaagaaattggtggatagcaccgataaagccgacttgcgacttatctacttggctctggcgcacatgattaagttcaggggccacttcctgatcgagggcgaccttaaccccgacaacagtgacgtagacaaattgttcatccagcttgtacagacctataaccagctgttcgaggaaaaccctattaacgccagcggggtggatgcgaaggccatacttagcgccaggctgagcaaaagcaggcgcttggagaacctgatagcccagctgcccggtgaaaagaagaacggcctcttcggtaatctgattgccctgagcctgggcctgacccccaacttcaagagcaacttcgacctggcagaagatgccaagctgcagttgagtaaggacacctatgacgacgacttggacaatctgctcgcccaaatcggcgaccagtacgctgacctgttcctcgccgccaagaacctttctgacgcaatcctgcttagcgatatccttagggtgaacacagagatcaccaaggcccccctgagcgccagcatgatcaagaggtacgacgagcaccatcaggacctgacccttctgaaggccctggtgaggcagcaactgcccgagaagtacaaggagatctttttcgaccagagcaagaacggctacgccggctacatcgacggcggagccagccaagaggagttctacaagttcatcaagcccatcctggagaagatggatggcaccgaggagctgctggtgaagctgaacagggaagatttgctccggaagcagaggacctttgacaacggtagcatcccccaccagatccacctgggcgagctgcacgcaatactgaggcgacaggaggatttctaccccttcctcaaggacaatagggagaaaatcgaaaagattctgaccttcaggatcccctactacgtgggccctcttgccaggggcaacagccgattcgcttggatgacaagaaagagcgaggagaccatcaccccctggaacttcgaggaagtggtggacaaaggagcaagcgcgcagtctttcatcgaacggatgaccaatttcgacaaaaacctgcctaacgagaaggtgctgcccaagcacagcctgctttacgagtacttcaccgtgtacaacgagctcaccaaggtgaaatatgtgaccgagggcatgcgaaaacccgctttcctgagcggcgagcagaagaaggccatcgtggacctgctgttcaagaccaacaggaaggtgaccgtgaagcagctgaaggaggactacttcaagaagatcgagtgctttgatagcgtggaaataagcggcgtggaggacaggttcaacgccagcctgggcacctaccacgacttgttgaagataatcaaagacaaggatttcctggataatgaggagaacgaggatatactcgaggacatcgtgctgactttgaccctgtttgaggaccgagagatgattgaagaaaggctcaaaacctacgcccacctgttcgacgacaaagtgatgaaacaactgaagagacgaagatacaccggctggggcagactgtccaggaagctcatcaacggcattagggacaagcagagcggcaagaccatcctggatttcctgaagtccgacggcttcgccaaccgaaacttcatgcagctgattcacgatgacagcttgaccttcaaggaggacatccagaaggcccaggttagcggccagggcgactccctgcacgaacatattgcaaacctggcaggctcccctgcgatcaagaagggcatactgcagaccgttaaggttgtggacgaattggtcaaggtcatgggcaggcacaagcccgaaaacatagttatagagatggccagagagaaccagaccacccaaaagggccagaagaacagccgggagcgcatgaaaaggatcgaggagggtatcaaggaactcggaagccagatcctcaaagagcaccccgtggagaatacccagctccagaacgagaagctgtacctgtactacctgcagaacggcagggacatgtacgttgaccaggagttggacatcaacaggctttcagactatgacgtggatcacatagtgccccagagctttcttaaagacgatagcatcgacaacaaggtcctgacccgctccgacaaaaacaggggcaaaagcgacaacgtgccaagcgaagaggtggttaaaaagatgaagaactactggaggcaactgctcaacgcgaaattgatcacccagagaaagttcgataacctgaccaaggccgagaggggcggactctccgaacttgacaaagcgggcttcataaagaggcagctggtcgagacccgacagatcacgaagcacgtggcccaaatcctcgacagcagaatgaataccaagtacgatgagaatgacaaactcatcagggaagtgaaagtgattaccctgaagagcaagttggtgtccgactttcgcaaagatttccagttctacaaggtgagggagatcaacaactaccaccatgcccacgacgcatacctgaacgccgtggtcggcaccgccctgattaagaagtatccaaagctggagtccgaatttgtctacggcgactacaaagtttacgatgtgaggaagatgatcgctaagagcgaacaggagatcggcaaggccaccgctaagtatttcttctacagcaacatcatgaactttttcaagaccgagatcacacttgccaacggcgaaatcaggaagaggccgcttatcgagaccaacggtgagaccggcgagatcgtgtgggacaagggcagggacttcgccaccgtgaggaaagtcctgagcatgccccaggtgaatattgtgaaaaaaactgaggtgcagacaggcggctttagcaaggaatccatcctgcccaagaggaacagcgacaagctgatcgcccggaagaaggactgggaccctaagaagtatggaggcttcgacagccccaccgtagcctacagcgtgctggtggtcgcgaaggtagagaaggggaagagcaagaaactgaagagcgtgaaggagctgctcggcataaccatcatggagaggtccagctttgagaagaaccccattgactttttggaagccaagggctacaaagaggtcaaaaaggacctgatcatcaaactccccaagtactccctgtttgaattggagaacggcagaaagaggatgctggcgagcgctggggaactgcaaaagggcaacgaactggcgctgcccagcaagtacgtgaattttctgtacctggcgtcccactacgaaaagctgaaaggcagccccgaggacaacgagcagaagcagctgttcgtggagcagcacaagcattacctggacgagataatcgagcaaatcagcgagttcagcaagagggtgattctggccgacgcgaacctggataaggtcctcagcgcctacaacaagcaccgagacaaacccatcagggagcaggccgagaatatcatacacctgttcaccctgacaaatctgggcgcacctgcggcattcaaatacttcgataccaccatcgacaggaaaaggtacactagcactaaggaggtgctggatgccaccttgatccaccagtccattaccggcctgtatgagaccaggatcgacctgagccagcttggaggcgactctagggcggacccaaaaaagaaaaggaaggtggaattcgctggagacatgagagctgccaacctttggccaagcccgctcatgatcaaacgctctaagaagaacagcctggccttgtccctgacggccgaccagatggtcagtgccttgttggatgctgagccccccatactctattccgagtatgatcctaccagacccttcagtgaagcttcgatgatgggcttactgaccaacctggcagacagggagctggttcacatgatcaactgggcgaagagggtgccaggctttgtggatttgaccctccatgatcaggtccaccttcttgaatgtgcctggctagagatcctgatgattggtctcgtctggcgctccatggagcacccagtgaagctactgtttgctcctaacttgctcttggacaggaaccagggaaaatgtgtagagggcatggtggagatcttcgacatgctgctggctacatcatctcggttccgcatgatgaatctgcagggagaggagtttgtgtgcctcaaatctattattttgcttaattctggagtgtacacatttctgtccagcaccctgaagtctctggaagagaaggaccatatccaccgagtcctggacaagatcacagacactttgatccacctgatggccaaggcaggcctgaccctgcagcagcagcaccagcggctggcccagctcctcctcatcctctcccacatcaggcacatgagtaacaaaggcatggagcatctgtacagcatgaagtgcaagaacgtggtgcccctctatgacctgctgctggaggcggcggacgcccaccgcctacatgcgcccactagccgtggaggggcatccgtggaggagacggaccaaagccacttggccactgcgggctctacttcatcgcattccttgcaaaagtattacatcacgggggaggcagagggtttccctgccacagcttctagaggcagtggagagggcagaggaagtctgctaacatgcggtgacgtcgaggagaatcctggcccaatgaacctgagcaaaaacgtgagcgtgagcgtgtatatgaaggggaacgtcaacaatcatgagtttgagtacgacggggaaggtggtggtgatccttatacaggtaaatattccatgaagatgacgctacgtggtcaaaattccctacccttttcctatgatatcattaccacggcatttcagtatggtttccgcgtatttacaaaataccctgagggaattgttgactattttaaggactcgcttcccgacgcattccagtggaacagacgaattgtgtttgaagatggtggagtactaaacatgagcagtgatatcacatataaagataatgttctgcatggtgacgtcaaggctgagggagtgaacttcccgccgaatgggccagtgatgaagaatgaaattgtgatggaggaaccgactgaagaaacatttactccaaaaaacggggttcttgttggcttttgtcccaaagcgtacttacttaaagacggttcctattactatggaaatatgacaacattttacagatccaagaaatctggccaggcacctcctgggtatcactttgttaagcatcgtctcgtcaagaccaatgtgggacatggatttaagacggttgagcagactgaatatgccactgctcatgtcagtgatcttcccaagttcgaagcttga

SEQ ID NO: 53 - DNA, 6891 bp, Artificial sequence
  cloned, variant sequence 9
atgggcaagcccatccctaaccccctgttggggctggacagcaccgctcccaaaaagaaaaggaaggtgggcattcacggcgtgcctgcggccaccggtgctggagacatgagagctgccaacctttggccaagcccgctcatgatcaaacgctctaagaagaacagcctggccttgtccctgacggccgaccagatggtcagtgccttgttggatgctgagccccccatactctattccgagtatgatcctaccagacccttcagtgaagcttcgatgatgggcttactgaccaacctggcagacagggagctggttcacatgatcaactgggcgaagagggtgccaggctttgtggatttgaccctccatgatcaggtccaccttcttgaatgtgcctggctagagatcctgatgattggtctcgtctggcgctccatggagcacccagtgaagctactgtttgctcctaacttgctcttggacaggaaccagggaaaatgtgtagagggcatggtggagatcttcgacatgctgctggctacatcatctcggttccgcatgatgaatctgcagggagaggagtttgtgtgcctcaaatctattattttgcttaattctggagtgtacacatttctgtccagcaccctgaagtctctggaagagaaggaccatatccaccgagtcctggacaagatcacagacactttgatccacctgatggccaaggcaggcctgaccctgcagcagcagcaccagcggctggcccagctcctcctcatcctctcccacatcaggcacatgagtaacaaaggcatggagcatctgtacagcatgaagtgcaagaacgtggtgcccctctatgacctgctgctggaggcggcggacgcccaccgcctacatgcgcccactagccgtggaggggcatccgtggaggagacggaccaaagccacttggccactgcgggctctacttcatcgcattccttgcaaaagtattacatcacgggggaggcagagggtttccctgccacagctggcgccagcggcagcaagactcccggggacaaaaagtacagcatcggccttgatatcggcaccaatagcgtgggctgggccgttatcacagacgaatacaaggtacccagcaagaagttcaaggtgctggggaatacagacaggcactctatcaagaaaaaccttatcggggctctgctgtttgactcaggcgagaccgccgaggccaccaggttgaagaggaccgcaaggcgaaggtacacccggaggaagaacaggatctgctatctgcaggagatcttcagcaacgagatggccaaggtggacgacagcttcttccacaggctggaggagagcttccttgtcgaggaggataagaagcacgaacgacaccccatcttcggcaacatagtcgacgaggtcgcttatcacgagaagtaccccaccatctaccacctgcgaaagaaattggtggatagcaccgataaagccgacttgcgacttatctacttggctctggcgcacatgattaagttcaggggccacttcctgatcgagggcgaccttaaccccgacaacagtgacgtagacaaattgttcatccagcttgtacagacctataaccagctgttcgaggaaaaccctattaacgccagcggggtggatgcgaaggccatacttagcgccaggctgagcaaaagcaggcgcttggagaacctgatagcccagctgcccggtgaaaagaagaacggcctcttcggtaatctgattgccctgagcctgggcctgacccccaacttcaagagcaacttcgacctggcagaagatgccaagctgcagttgagtaaggacacctatgacgacgacttggacaatctgctcgcccaaatcggcgaccagtacgctgacctgttcctcgccgccaagaacctttctgacgcaatcctgcttagcgatatccttagggtgaacacagagatcaccaaggcccccctgagcgccagcatgatcaagaggtacgacgagcaccatcaggacctgacccttctgaaggccctggtgaggcagcaactgcccgagaagtacaaggagatctttttcgaccagagcaagaacggctacgccggctacatcgacggcggagccagccaagaggagttctacaagttcatcaagcccatcctggagaagatggatggcaccgaggagctgctggtgaagctgaacagggaagatttgctccggaagcagaggacctttgacaacggtagcatcccccaccagatccacctgggcgagctgcacgcaatactgaggcgacaggaggatttctaccccttcctcaaggacaatagggagaaaatcgaaaagattctgaccttcaggatcccctactacgtgggccctcttgccaggggcaacagccgattcgcttggatgacaagaaagagcgaggagaccatcaccccctggaacttcgaggaagtggtggacaaaggagcaagcgcgcagtctttcatcgaacggatgaccaatttcgacaaaaacctgcctaacgagaaggtgctgcccaagcacagcctgctttacgagtacttcaccgtgtacaacgagctcaccaaggtgaaatatgtgaccgagggcatgcgaaaacccgctttcctgagcggcgagcagaagaaggccatcgtggacctgctgttcaagaccaacaggaaggtgaccgtgaagcagctgaaggaggactacttcaagaagatcgagtgctttgatagcgtggaaataagcggcgtggaggacaggttcaacgccagcctgggcacctaccacgacttgttgaagataatcaaagacaaggatttcctggataatgaggagaacgaggatatactcgaggacatcgtgctgactttgaccctgtttgaggaccgagagatgattgaagaaaggctcaaaacctacgcccacctgttcgacgacaaagtgatgaaacaactgaagagacgaagatacaccggctggggcagactgtccaggaagctcatcaacggcattagggacaagcagagcggcaagaccatcctggatttcctgaagtccgacggcttcgccaaccgaaacttcatgcagctgattcacgatgacagcttgaccttcaaggaggacatccagaaggcccaggttagcggccagggcgactccctgcacgaacatattgcaaacctggcaggctcccctgcgatcaagaagggcatactgcagaccgttaaggttgtggacgaattggtcaaggtcatgggcaggcacaagcccgaaaacatagttatagagatggccagagagaaccagaccacccaaaagggccagaagaacagccgggagcgcatgaaaaggatcgaggagggtatcaaggaactcggaagccagatcctcaaagagcaccccgtggagaatacccagctccagaacgagaagctgtacctgtactacctgcagaacggcagggacatgtacgttgaccaggagttggacatcaacaggctttcagactatgacgtggatcacatagtgccccagagctttcttaaagacgatagcatcgacaacaaggtcctgacccgctccgacaaaaacaggggcaaaagcgacaacgtgccaagcgaagaggtggttaaaaagatgaagaactactggaggcaactgctcaacgcgaaattgatcacccagagaaagttcgataacctgaccaaggccgagaggggcggactctccgaacttgacaaagcgggcttcataaagaggcagctggtcgagacccgacagatcacgaagcacgtggcccaaatcctcgacagcagaatgaataccaagtacgatgagaatgacaaactcatcagggaagtgaaagtgattaccctgaagagcaagttggtgtccgactttcgcaaagatttccagttctacaaggtgagggagatcaacaactaccaccatgcccacgacgcatacctgaacgccgtggtcggcaccgccctgattaagaagtatccaaagctggagtccgaatttgtctacggcgactacaaagtttacgatgtgaggaagatgatcgctaagagcgaacaggagatcggcaaggccaccgctaagtatttcttctacagcaacatcatgaactttttcaagaccgagatcacacttgccaacggcgaaatcaggaagaggccgcttatcgagaccaacggtgagaccggcgagatcgtgtgggacaagggcagggacttcgccaccgtgaggaaagtcctgagcatgccccaggtgaatattgtgaaaaaaactgaggtgcagacaggcggctttagcaaggaatccatcctgcccaagaggaacagcgacaagctgatcgcccggaagaaggactgggaccctaagaagtatggaggcttcgacagccccaccgtagcctacagcgtgctggtggtcgcgaaggtagagaaggggaagagcaagaaactgaagagcgtgaaggagctgctcggcataaccatcatggagaggtccagctttgagaagaaccccattgactttttggaagccaagggctacaaagaggtcaaaaaggacctgatcatcaaactccccaagtactccctgtttgaattggagaacggcagaaagaggatgctggcgagcgctggggaactgcaaaagggcaacgaactggcgctgcccagcaagtacgtgaattttctgtacctggcgtcccactacgaaaagctgaaaggcagccccgaggacaacgagcagaagcagctgttcgtggagcagcacaagcattacctggacgagataatcgagcaaatcagcgagttcagcaagagggtgattctggccgacgcgaacctggataaggtcctcagcgcctacaacaagcaccgagacaaacccatcagggagcaggccgagaatatcatacacctgttcaccctgacaaatctgggcgcacctgcggcattcaaatacttcgataccaccatcgacaggaaaaggtacactagcactaaggaggtgctggatgccaccttgatccaccagtccattaccggcctgtatgagaccaggatcgacctgagccagcttggaggcgactctagggcggacccaaaaaagaaaaggaaggtggaattcgctggagacatgagagctgccaacctttggccaagcccgctcatgatcaaacgctctaagaagaacagcctggccttgtccctgacggccgaccagatggtcagtgccttgttggatgctgagccccccatactctattccgagtatgatcctaccagacccttcagtgaagcttcgatgatgggcttactgaccaacctggcagacagggagctggttcacatgatcaactgggcgaagagggtgccaggctttgtggatttgaccctccatgatcaggtccaccttcttgaatgtgcctggctagagatcctgatgattggtctcgtctggcgctccatggagcacccagtgaagctactgtttgctcctaacttgctcttggacaggaaccagggaaaatgtgtagagggcatggtggagatcttcgacatgctgctggctacatcatctcggttccgcatgatgaatctgcagggagaggagtttgtgtgcctcaaatctattattttgcttaattctggagtgtacacatttctgtccagcaccctgaagtctctggaagagaaggaccatatccaccgagtcctggacaagatcacagacactttgatccacctgatggccaaggcaggcctgaccctgcagcagcagcaccagcggctggcccagctcctcctcatcctctcccacatcaggcacatgagtaacaaaggcatggagcatctgtacagcatgaagtgcaagaacgtggtgcccctctatgacctgctgctggaggcggcggacgcccaccgcctacatgcgcccactagccgtggaggggcatccgtggaggagacggaccaaagccacttggccactgcgggctctacttcatcgcattccttgcaaaagtattacatcacgggggaggcagagggtttccctgccacagcttctagaggcagtggagagggcagaggaagtctgctaacatgcggtgacgtcgaggagaatcctggcccaatgaacctgagcaaaaacgtgagcgtgagcgtgtatatgaaggggaacgtcaacaatcatgagtttgagtacgacggggaaggtggtggtgatccttatacaggtaaatattccatgaagatgacgctacgtggtcaaaattccctacccttttcctatgatatcattaccacggcatttcagtatggtttccgcgtatttacaaaataccctgagggaattgttgactattttaaggactcgcttcccgacgcattccagtggaacagacgaattgtgtttgaagatggtggagtactaaacatgagcagtgatatcacatataaagataatgttctgcatggtgacgtcaaggctgagggagtgaacttcccgccgaatgggccagtgatgaagaatgaaattgtgatggaggaaccgactgaagaaacatttactccaaaaaacggggttcttgttggcttttgtcccaaagcgtacttacttaaagacggttcctattactatggaaatatgacaacattttacagatccaagaaatctggccaggcacctcctgggtatcactttgttaagcatcgtctcgtcaagaccaatgtgggacatggatttaagacggttgagcagactgaatatgccactgctcatgtcagtgatcttcccaagttcgaagcttga

SEQ ID NO: 54 - DNA, 6882 bp, Artificial sequence
  cloned, variant sequence 10
atgggcaagcccatccctaaccccctgttggggctggacagcaccgctcccaaaaagaaaaggaaggtgggcattcacggcgtgcctgcggccaccggtgctggagacatgagagctgccaacctttggccaagcccgctcatgatcaaacgctctaagaagaacagcctggccttgtccctgacggccgaccagatggtcagtgccttgttggatgctgagccccccatactctattccgagtatgatcctaccagacccttcagtgaagcttcgatgatgggcttactgaccaacctggcagacagggagctggttcacatgatcaactgggcgaagagggtgccaggctttgtggatttgaccctccatgatcaggtccaccttcttgaatgtgcctggctagagatcctgatgattggtctcgtctggcgctccatggagcacccagtgaagctactgtttgctcctaacttgctcttggacaggaaccagggaaaatgtgtagagggcatggtggagatcttcgacatgctgctggctacatcatctcggttccgcatgatgaatctgcagggagaggagtttgtgtgcctcaaatctattattttgcttaattctggagtgtacacatttctgtccagcaccctgaagtctctggaagagaaggaccatatccaccgagtcctggacaagatcacagacactttgatccacctgatggccaaggcaggcctgaccctgcagcagcagcaccagcggctggcccagctcctcctcatcctctcccacatcaggcacatgagtaacaaaggcatggagcatctgtacagcatgaagtgcaagaacgtggtgcccctctatgacctgctgctggaggcggcggacgcccaccgcctacatgcgcccactagccgtggaggggcatccgtggaggagacggaccaaagccacttggccactgcgggctctacttcatcgcattccttgcaaaagtattacatcacgggggaggcagagggtttccctgccacagctacaccagaatcgggcgccgacaaaaagtacagcatcggccttgatatcggcaccaatagcgtgggctgggccgttatcacagacgaatacaaggtacccagcaagaagttcaaggtgctggggaatacagacaggcactctatcaagaaaaaccttatcggggctctgctgtttgactcaggcgagaccgccgaggccaccaggttgaagaggaccgcaaggcgaaggtacacccggaggaagaacaggatctgctatctgcaggagatcttcagcaacgagatggccaaggtggacgacagcttcttccacaggctggaggagagcttccttgtcgaggaggataagaagcacgaacgacaccccatcttcggcaacatagtcgacgaggtcgcttatcacgagaagtaccccaccatctaccacctgcgaaagaaattggtggatagcaccgataaagccgacttgcgacttatctacttggctctggcgcacatgattaagttcaggggccacttcctgatcgagggcgaccttaaccccgacaacagtgacgtagacaaattgttcatccagcttgtacagacctataaccagctgttcgaggaaaaccctattaacgccagcggggtggatgcgaaggccatacttagcgccaggctgagcaaaagcaggcgcttggagaacctgatagcccagctgcccggtgaaaagaagaacggcctcttcggtaatctgattgccctgagcctgggcctgacccccaacttcaagagcaacttcgacctggcagaagatgccaagctgcagttgagtaaggacacctatgacgacgacttggacaatctgctcgcccaaatcggcgaccagtacgctgacctgttcctcgccgccaagaacctttctgacgcaatcctgcttagcgatatccttagggtgaacacagagatcaccaaggcccccctgagcgccagcatgatcaagaggtacgacgagcaccatcaggacctgacccttctgaaggccctggtgaggcagcaactgcccgagaagtacaaggagatctttttcgaccagagcaagaacggctacgccggctacatcgacggcggagccagccaagaggagttctacaagttcatcaagcccatcctggagaagatggatggcaccgaggagctgctggtgaagctgaacagggaagatttgctccggaagcagaggacctttgacaacggtagcatcccccaccagatccacctgggcgagctgcacgcaatactgaggcgacaggaggatttctaccccttcctcaaggacaatagggagaaaatcgaaaagattctgaccttcaggatcccctactacgtgggccctcttgccaggggcaacagccgattcgcttggatgacaagaaagagcgaggagaccatcaccccctggaacttcgaggaagtggtggacaaaggagcaagcgcgcagtctttcatcgaacggatgaccaatttcgacaaaaacctgcctaacgagaaggtgctgcccaagcacagcctgctttacgagtacttcaccgtgtacaacgagctcaccaaggtgaaatatgtgaccgagggcatgcgaaaacccgctttcctgagcggcgagcagaagaaggccatcgtggacctgctgttcaagaccaacaggaaggtgaccgtgaagcagctgaaggaggactacttcaagaagatcgagtgctttgatagcgtggaaataagcggcgtggaggacaggttcaacgccagcctgggcacctaccacgacttgttgaagataatcaaagacaaggatttcctggataatgaggagaacgaggatatactcgaggacatcgtgctgactttgaccctgtttgaggaccgagagatgattgaagaaaggctcaaaacctacgcccacctgttcgacgacaaagtgatgaaacaactgaagagacgaagatacaccggctggggcagactgtccaggaagctcatcaacggcattagggacaagcagagcggcaagaccatcctggatttcctgaagtccgacggcttcgccaaccgaaacttcatgcagctgattcacgatgacagcttgaccttcaaggaggacatccagaaggcccaggttagcggccagggcgactccctgcacgaacatattgcaaacctggcaggctcccctgcgatcaagaagggcatactgcagaccgttaaggttgtggacgaattggtcaaggtcatgggcaggcacaagcccgaaaacatagttatagagatggccagagagaaccagaccacccaaaagggccagaagaacagccgggagcgcatgaaaaggatcgaggagggtatcaaggaactcggaagccagatcctcaaagagcaccccgtggagaatacccagctccagaacgagaagctgtacctgtactacctgcagaacggcagggacatgtacgttgaccaggagttggacatcaacaggctttcagactatgacgtggatcacatagtgccccagagctttcttaaagacgatagcatcgacaacaaggtcctgacccgctccgacaaaaacaggggcaaaagcgacaacgtgccaagcgaagaggtggttaaaaagatgaagaactactggaggcaactgctcaacgcgaaattgatcacccagagaaagttcgataacctgaccaaggccgagaggggcggactctccgaacttgacaaagcgggcttcataaagaggcagctggtcgagacccgacagatcacgaagcacgtggcccaaatcctcgacagcagaatgaataccaagtacgatgagaatgacaaactcatcagggaagtgaaagtgattaccctgaagagcaagttggtgtccgactttcgcaaagatttccagttctacaaggtgagggagatcaacaactaccaccatgcccacgacgcatacctgaacgccgtggtcggcaccgccctgattaagaagtatccaaagctggagtccgaatttgtctacggcgactacaaagtttacgatgtgaggaagatgatcgctaagagcgaacaggagatcggcaaggccaccgctaagtatttcttctacagcaacatcatgaactttttcaagaccgagatcacacttgccaacggcgaaatcaggaagaggccgcttatcgagaccaacggtgagaccggcgagatcgtgtgggacaagggcagggacttcgccaccgtgaggaaagtcctgagcatgccccaggtgaatattgtgaaaaaaactgaggtgcagacaggcggctttagcaaggaatccatcctgcccaagaggaacagcgacaagctgatcgcccggaagaaggactgggaccctaagaagtatggaggcttcgacagccccaccgtagcctacagcgtgctggtggtcgcgaaggtagagaaggggaagagcaagaaactgaagagcgtgaaggagctgctcggcataaccatcatggagaggtccagctttgagaagaaccccattgactttttggaagccaagggctacaaagaggtcaaaaaggacctgatcatcaaactccccaagtactccctgtttgaattggagaacggcagaaagaggatgctggcgagcgctggggaactgcaaaagggcaacgaactggcgctgcccagcaagtacgtgaattttctgtacctggcgtcccactacgaaaagctgaaaggcagccccgaggacaacgagcagaagcagctgttcgtggagcagcacaagcattacctggacgagataatcgagcaaatcagcgagttcagcaagagggtgattctggccgacgcgaacctggataaggtcctcagcgcctacaacaagcaccgagacaaacccatcagggagcaggccgagaatatcatacacctgttcaccctgacaaatctgggcgcacctgcggcattcaaatacttcgataccaccatcgacaggaaaaggtacactagcactaaggaggtgctggatgccaccttgatccaccagtccattaccggcctgtatgagaccaggatcgacctgagccagcttggaggcgactctagggcggacccaaaaaagaaaaggaaggtggaattcgctggagacatgagagctgccaacctttggccaagcccgctcatgatcaaacgctctaagaagaacagcctggccttgtccctgacggccgaccagatggtcagtgccttgttggatgctgagccccccatactctattccgagtatgatcctaccagacccttcagtgaagcttcgatgatgggcttactgaccaacctggcagacagggagctggttcacatgatcaactgggcgaagagggtgccaggctttgtggatttgaccctccatgatcaggtccaccttcttgaatgtgcctggctagagatcctgatgattggtctcgtctggcgctccatggagcacccagtgaagctactgtttgctcctaacttgctcttggacaggaaccagggaaaatgtgtagagggcatggtggagatcttcgacatgctgctggctacatcatctcggttccgcatgatgaatctgcagggagaggagtttgtgtgcctcaaatctattattttgcttaattctggagtgtacacatttctgtccagcaccctgaagtctctggaagagaaggaccatatccaccgagtcctggacaagatcacagacactttgatccacctgatggccaaggcaggcctgaccctgcagcagcagcaccagcggctggcccagctcctcctcatcctctcccacatcaggcacatgagtaacaaaggcatggagcatctgtacagcatgaagtgcaagaacgtggtgcccctctatgacctgctgctggaggcggcggacgcccaccgcctacatgcgcccactagccgtggaggggcatccgtggaggagacggaccaaagccacttggccactgcgggctctacttcatcgcattccttgcaaaagtattacatcacgggggaggcagagggtttccctgccacagcttctagaggcagtggagagggcagaggaagtctgctaacatgcggtgacgtcgaggagaatcctggcccaatgaacctgagcaaaaacgtgagcgtgagcgtgtatatgaaggggaacgtcaacaatcatgagtttgagtacgacggggaaggtggtggtgatccttatacaggtaaatattccatgaagatgacgctacgtggtcaaaattccctacccttttcctatgatatcattaccacggcatttcagtatggtttccgcgtatttacaaaataccctgagggaattgttgactattttaaggactcgcttcccgacgcattccagtggaacagacgaattgtgtttgaagatggtggagtactaaacatgagcagtgatatcacatataaagataatgttctgcatggtgacgtcaaggctgagggagtgaacttcccgccgaatgggccagtgatgaagaatgaaattgtgatggaggaaccgactgaagaaacatttactccaaaaaacggggttcttgttggcttttgtcccaaagcgtacttacttaaagacggttcctattactatggaaatatgacaacattttacagatccaagaaatctggccaggcacctcctgggtatcactttgttaagcatcgtctcgtcaagaccaatgtgggacatggatttaagacggttgagcagactgaatatgccactgctcatgtcagtgatcttcccaagttcgaagcttga

SEQ ID NO: 55 - DNA, 6882 bp, Artificial sequence
  cloned, variant sequence 11
atgggcaagcccatccctaaccccctgttggggctggacagcaccgctcccaaaaagaaaaggaaggtgggcattcacggcgtgcctgcggccaccggtcccgggggttccgctggagacatgagagctgccaacctttggccaagcccgctcatgatcaaacgctctaagaagaacagcctggccttgtccctgacggccgaccagatggtcagtgccttgttggatgctgagccccccatactctattccgagtatgatcctaccagacccttcagtgaagcttcgatgatgggcttactgaccaacctggcagacagggagctggttcacatgatcaactgggcgaagagggtgccaggctttgtggatttgaccctccatgatcaggtccaccttcttgaatgtgcctggctagagatcctgatgattggtctcgtctggcgctccatggagcacccagtgaagctactgtttgctcctaacttgctcttggacaggaaccagggaaaatgtgtagagggcatggtggagatcttcgacatgctgctggctacatcatctcggttccgcatgatgaatctgcagggagaggagtttgtgtgcctcaaatctattattttgcttaattctggagtgtacacatttctgtccagcaccctgaagtctctggaagagaaggaccatatccaccgagtcctggacaagatcacagacactttgatccacctgatggccaaggcaggcctgaccctgcagcagcagcaccagcggctggcccagctcctcctcatcctctcccacatcaggcacatgagtaacaaaggcatggagcatctgtacagcatgaagtgcaagaacgtggtgcccctctatgacctgctgctggaggcggcggacgcccaccgcctacatgcgcccactagccgtggaggggcatccgtggaggagacggaccaaagccacttggccactgcgggctctacttcatcgcattccttgcaaaagtattacatcacgggggaggcagagggtttccctgccacagctggcgccgacaaaaagtacagcatcggccttgatatcggcaccaatagcgtgggctgggccgttatcacagacgaatacaaggtacccagcaagaagttcaaggtgctggggaatacagacaggcactctatcaagaaaaaccttatcggggctctgctgtttgactcaggcgagaccgccgaggccaccaggttgaagaggaccgcaaggcgaaggtacacccggaggaagaacaggatctgctatctgcaggagatcttcagcaacgagatggccaaggtggacgacagcttcttccacaggctggaggagagcttccttgtcgaggaggataagaagcacgaacgacaccccatcttcggcaacatagtcgacgaggtcgcttatcacgagaagtaccccaccatctaccacctgcgaaagaaattggtggatagcaccgataaagccgacttgcgacttatctacttggctctggcgcacatgattaagttcaggggccacttcctgatcgagggcgaccttaaccccgacaacagtgacgtagacaaattgttcatccagcttgtacagacctataaccagctgttcgaggaaaaccctattaacgccagcggggtggatgcgaaggccatacttagcgccaggctgagcaaaagcaggcgcttggagaacctgatagcccagctgcccggtgaaaagaagaacggcctcttcggtaatctgattgccctgagcctgggcctgacccccaacttcaagagcaacttcgacctggcagaagatgccaagctgcagttgagtaaggacacctatgacgacgacttggacaatctgctcgcccaaatcggcgaccagtacgctgacctgttcctcgccgccaagaacctttctgacgcaatcctgcttagcgatatccttagggtgaacacagagatcaccaaggcccccctgagcgccagcatgatcaagaggtacgacgagcaccatcaggacctgacccttctgaaggccctggtgaggcagcaactgcccgagaagtacaaggagatctttttcgaccagagcaagaacggctacgccggctacatcgacggcggagccagccaagaggagttctacaagttcatcaagcccatcctggagaagatggatggcaccgaggagctgctggtgaagctgaacagggaagatttgctccggaagcagaggacctttgacaacggtagcatcccccaccagatccacctgggcgagctgcacgcaatactgaggcgacaggaggatttctaccccttcctcaaggacaatagggagaaaatcgaaaagattctgaccttcaggatcccctactacgtgggccctcttgccaggggcaacagccgattcgcttggatgacaagaaagagcgaggagaccatcaccccctggaacttcgaggaagtggtggacaaaggagcaagcgcgcagtctttcatcgaacggatgaccaatttcgacaaaaacctgcctaacgagaaggtgctgcccaagcacagcctgctttacgagtacttcaccgtgtacaacgagctcaccaaggtgaaatatgtgaccgagggcatgcgaaaacccgctttcctgagcggcgagcagaagaaggccatcgtggacctgctgttcaagaccaacaggaaggtgaccgtgaagcagctgaaggaggactacttcaagaagatcgagtgctttgatagcgtggaaataagcggcgtggaggacaggttcaacgccagcctgggcacctaccacgacttgttgaagataatcaaagacaaggatttcctggataatgaggagaacgaggatatactcgaggacatcgtgctgactttgaccctgtttgaggaccgagagatgattgaagaaaggctcaaaacctacgcccacctgttcgacgacaaagtgatgaaacaactgaagagacgaagatacaccggctggggcagactgtccaggaagctcatcaacggcattagggacaagcagagcggcaagaccatcctggatttcctgaagtccgacggcttcgccaaccgaaacttcatgcagctgattcacgatgacagcttgaccttcaaggaggacatccagaaggcccaggttagcggccagggcgactccctgcacgaacatattgcaaacctggcaggctcccctgcgatcaagaagggcatactgcagaccgttaaggttgtggacgaattggtcaaggtcatgggcaggcacaagcccgaaaacatagttatagagatggccagagagaaccagaccacccaaaagggccagaagaacagccgggagcgcatgaaaaggatcgaggagggtatcaaggaactcggaagccagatcctcaaagagcaccccgtggagaatacccagctccagaacgagaagctgtacctgtactacctgcagaacggcagggacatgtacgttgaccaggagttggacatcaacaggctttcagactatgacgtggatcacatagtgccccagagctttcttaaagacgatagcatcgacaacaaggtcctgacccgctccgacaaaaacaggggcaaaagcgacaacgtgccaagcgaagaggtggttaaaaagatgaagaactactggaggcaactgctcaacgcgaaattgatcacccagagaaagttcgataacctgaccaaggccgagaggggcggactctccgaacttgacaaagcgggcttcataaagaggcagctggtcgagacccgacagatcacgaagcacgtggcccaaatcctcgacagcagaatgaataccaagtacgatgagaatgacaaactcatcagggaagtgaaagtgattaccctgaagagcaagttggtgtccgactttcgcaaagatttccagttctacaaggtgagggagatcaacaactaccaccatgcccacgacgcatacctgaacgccgtggtcggcaccgccctgattaagaagtatccaaagctggagtccgaatttgtctacggcgactacaaagtttacgatgtgaggaagatgatcgctaagagcgaacaggagatcggcaaggccaccgctaagtatttcttctacagcaacatcatgaactttttcaagaccgagatcacacttgccaacggcgaaatcaggaagaggccgcttatcgagaccaacggtgagaccggcgagatcgtgtgggacaagggcagggacttcgccaccgtgaggaaagtcctgagcatgccccaggtgaatattgtgaaaaaaactgaggtgcagacaggcggctttagcaaggaatccatcctgcccaagaggaacagcgacaagctgatcgcccggaagaaggactgggaccctaagaagtatggaggcttcgacagccccaccgtagcctacagcgtgctggtggtcgcgaaggtagagaaggggaagagcaagaaactgaagagcgtgaaggagctgctcggcataaccatcatggagaggtccagctttgagaagaaccccattgactttttggaagccaagggctacaaagaggtcaaaaaggacctgatcatcaaactccccaagtactccctgtttgaattggagaacggcagaaagaggatgctggcgagcgctggggaactgcaaaagggcaacgaactggcgctgcccagcaagtacgtgaattttctgtacctggcgtcccactacgaaaagctgaaaggcagccccgaggacaacgagcagaagcagctgttcgtggagcagcacaagcattacctggacgagataatcgagcaaatcagcgagttcagcaagagggtgattctggccgacgcgaacctggataaggtcctcagcgcctacaacaagcaccgagacaaacccatcagggagcaggccgagaatatcatacacctgttcaccctgacaaatctgggcgcacctgcggcattcaaatacttcgataccaccatcgacaggaaaaggtacactagcactaaggaggtgctggatgccaccttgatccaccagtccattaccggcctgtatgagaccaggatcgacctgagccagcttggaggcgactctagggcggacccaaaaaagaaaaggaaggtggaattcgctggagacatgagagctgccaacctttggccaagcccgctcatgatcaaacgctctaagaagaacagcctggccttgtccctgacggccgaccagatggtcagtgccttgttggatgctgagccccccatactctattccgagtatgatcctaccagacccttcagtgaagcttcgatgatgggcttactgaccaacctggcagacagggagctggttcacatgatcaactgggcgaagagggtgccaggctttgtggatttgaccctccatgatcaggtccaccttcttgaatgtgcctggctagagatcctgatgattggtctcgtctggcgctccatggagcacccagtgaagctactgtttgctcctaacttgctcttggacaggaaccagggaaaatgtgtagagggcatggtggagatcttcgacatgctgctggctacatcatctcggttccgcatgatgaatctgcagggagaggagtttgtgtgcctcaaatctattattttgcttaattctggagtgtacacatttctgtccagcaccctgaagtctctggaagagaaggaccatatccaccgagtcctggacaagatcacagacactttgatccacctgatggccaaggcaggcctgaccctgcagcagcagcaccagcggctggcccagctcctcctcatcctctcccacatcaggcacatgagtaacaaaggcatggagcatctgtacagcatgaagtgcaagaacgtggtgcccctctatgacctgctgctggaggcggcggacgcccaccgcctacatgcgcccactagccgtggaggggcatccgtggaggagacggaccaaagccacttggccactgcgggctctacttcatcgcattccttgcaaaagtattacatcacgggggaggcagagggtttccctgccacagcttctagaggcagtggagagggcagaggaagtctgctaacatgcggtgacgtcgaggagaatcctggcccaatgaacctgagcaaaaacgtgagcgtgagcgtgtatatgaaggggaacgtcaacaatcatgagtttgagtacgacggggaaggtggtggtgatccttatacaggtaaatattccatgaagatgacgctacgtggtcaaaattccctacccttttcctatgatatcattaccacggcatttcagtatggtttccgcgtatttacaaaataccctgagggaattgttgactattttaaggactcgcttcccgacgcattccagtggaacagacgaattgtgtttgaagatggtggagtactaaacatgagcagtgatatcacatataaagataatgttctgcatggtgacgtcaaggctgagggagtgaacttcccgccgaatgggccagtgatgaagaatgaaattgtgatggaggaaccgactgaagaaacatttactccaaaaaacggggttcttgttggcttttgtcccaaagcgtacttacttaaagacggttcctattactatggaaatatgacaacattttacagatccaagaaatctggccaggcacctcctgggtatcactttgttaagcatcgtctcgtcaagaccaatgtgggacatggatttaagacggttgagcagactgaatatgccactgctcatgtcagtgatcttcccaagttcgaagcttga

SEQ ID NO: 56 - DNA, 6909 bp, Artificial sequence
  cloned, variant sequence 12
atgggcaagcccatccctaaccccctgttggggctggacagcaccgctcccaaaaagaaaaggaaggtgggcattcacggcgtgcctgcggccaccggtggaggctctgctggagacatgagagctgccaacctttggccaagcccgctcatgatcaaacgctctaagaagaacagcctggccttgtccctgacggccgaccagatggtcagtgccttgttggatgctgagccccccatactctattccgagtatgatcctaccagacccttcagtgaagcttcgatgatgggcttactgaccaacctggcagacagggagctggttcacatgatcaactgggcgaagagggtgccaggctttgtggatttgaccctccatgatcaggtccaccttcttgaatgtgcctggctagagatcctgatgattggtctcgtctggcgctccatggagcacccagtgaagctactgtttgctcctaacttgctcttggacaggaaccagggaaaatgtgtagagggcatggtggagatcttcgacatgctgctggctacatcatctcggttccgcatgatgaatctgcagggagaggagtttgtgtgcctcaaatctattattttgcttaattctggagtgtacacatttctgtccagcaccctgaagtctctggaagagaaggaccatatccaccgagtcctggacaagatcacagacactttgatccacctgatggccaaggcaggcctgaccctgcagcagcagcaccagcggctggcccagctcctcctcatcctctcccacatcaggcacatgagtaacaaaggcatggagcatctgtacagcatgaagtgcaagaacgtggtgcccctctatgacctgctgctggaggcggcggacgcccaccgcctacatgcgcccactagccgtggaggggcatccgtggaggagacggaccaaagccacttggccactgcgggctctacttcatcgcattccttgcaaaagtattacatcacgggggaggcagagggtttccctgccacagcttccggatctgaaactcccgggacctcagagggcgccgacaaaaagtacagcatcggccttgatatcggcaccaatagcgtgggctgggccgttatcacagacgaatacaaggtacccagcaagaagttcaaggtgctggggaatacagacaggcactctatcaagaaaaaccttatcggggctctgctgtttgactcaggcgagaccgccgaggccaccaggttgaagaggaccgcaaggcgaaggtacacccggaggaagaacaggatctgctatctgcaggagatcttcagcaacgagatggccaaggtggacgacagcttcttccacaggctggaggagagcttccttgtcgaggaggataagaagcacgaacgacaccccatcttcggcaacatagtcgacgaggtcgcttatcacgagaagtaccccaccatctaccacctgcgaaagaaattggtggatagcaccgataaagccgacttgcgacttatctacttggctctggcgcacatgattaagttcaggggccacttcctgatcgagggcgaccttaaccccgacaacagtgacgtagacaaattgttcatccagcttgtacagacctataaccagctgttcgaggaaaaccctattaacgccagcggggtggatgcgaaggccatacttagcgccaggctgagcaaaagcaggcgcttggagaacctgatagcccagctgcccggtgaaaagaagaacggcctcttcggtaatctgattgccctgagcctgggcctgacccccaacttcaagagcaacttcgacctggcagaagatgccaagctgcagttgagtaaggacacctatgacgacgacttggacaatctgctcgcccaaatcggcgaccagtacgctgacctgttcctcgccgccaagaacctttctgacgcaatcctgcttagcgatatccttagggtgaacacagagatcaccaaggcccccctgagcgccagcatgatcaagaggtacgacgagcaccatcaggacctgacccttctgaaggccctggtgaggcagcaactgcccgagaagtacaaggagatctttttcgaccagagcaagaacggctacgccggctacatcgacggcggagccagccaagaggagttctacaagttcatcaagcccatcctggagaagatggatggcaccgaggagctgctggtgaagctgaacagggaagatttgctccggaagcagaggacctttgacaacggtagcatcccccaccagatccacctgggcgagctgcacgcaatactgaggcgacaggaggatttctaccccttcctcaaggacaatagggagaaaatcgaaaagattctgaccttcaggatcccctactacgtgggccctcttgccaggggcaacagccgattcgcttggatgacaagaaagagcgaggagaccatcaccccctggaacttcgaggaagtggtggacaaaggagcaagcgcgcagtctttcatcgaacggatgaccaatttcgacaaaaacctgcctaacgagaaggtgctgcccaagcacagcctgctttacgagtacttcaccgtgtacaacgagctcaccaaggtgaaatatgtgaccgagggcatgcgaaaacccgctttcctgagcggcgagcagaagaaggccatcgtggacctgctgttcaagaccaacaggaaggtgaccgtgaagcagctgaaggaggactacttcaagaagatcgagtgctttgatagcgtggaaataagcggcgtggaggacaggttcaacgccagcctgggcacctaccacgacttgttgaagataatcaaagacaaggatttcctggataatgaggagaacgaggatatactcgaggacatcgtgctgactttgaccctgtttgaggaccgagagatgattgaagaaaggctcaaaacctacgcccacctgttcgacgacaaagtgatgaaacaactgaagagacgaagatacaccggctggggcagactgtccaggaagctcatcaacggcattagggacaagcagagcggcaagaccatcctggatttcctgaagtccgacggcttcgccaaccgaaacttcatgcagctgattcacgatgacagcttgaccttcaaggaggacatccagaaggcccaggttagcggccagggcgactccctgcacgaacatattgcaaacctggcaggctcccctgcgatcaagaagggcatactgcagaccgttaaggttgtggacgaattggtcaaggtcatgggcaggcacaagcccgaaaacatagttatagagatggccagagagaaccagaccacccaaaagggccagaagaacagccgggagcgcatgaaaaggatcgaggagggtatcaaggaactcggaagccagatcctcaaagagcaccccgtggagaatacccagctccagaacgagaagctgtacctgtactacctgcagaacggcagggacatgtacgttgaccaggagttggacatcaacaggctttcagactatgacgtggatcacatagtgccccagagctttcttaaagacgatagcatcgacaacaaggtcctgacccgctccgacaaaaacaggggcaaaagcgacaacgtgccaagcgaagaggtggttaaaaagatgaagaactactggaggcaactgctcaacgcgaaattgatcacccagagaaagttcgataacctgaccaaggccgagaggggcggactctccgaacttgacaaagcgggcttcataaagaggcagctggtcgagacccgacagatcacgaagcacgtggcccaaatcctcgacagcagaatgaataccaagtacgatgagaatgacaaactcatcagggaagtgaaagtgattaccctgaagagcaagttggtgtccgactttcgcaaagatttccagttctacaaggtgagggagatcaacaactaccaccatgcccacgacgcatacctgaacgccgtggtcggcaccgccctgattaagaagtatccaaagctggagtccgaatttgtctacggcgactacaaagtttacgatgtgaggaagatgatcgctaagagcgaacaggagatcggcaaggccaccgctaagtatttcttctacagcaacatcatgaactttttcaagaccgagatcacacttgccaacggcgaaatcaggaagaggccgcttatcgagaccaacggtgagaccggcgagatcgtgtgggacaagggcagggacttcgccaccgtgaggaaagtcctgagcatgccccaggtgaatattgtgaaaaaaactgaggtgcagacaggcggctttagcaaggaatccatcctgcccaagaggaacagcgacaagctgatcgcccggaagaaggactgggaccctaagaagtatggaggcttcgacagccccaccgtagcctacagcgtgctggtggtcgcgaaggtagagaaggggaagagcaagaaactgaagagcgtgaaggagctgctcggcataaccatcatggagaggtccagctttgagaagaaccccattgactttttggaagccaagggctacaaagaggtcaaaaaggacctgatcatcaaactccccaagtactccctgtttgaattggagaacggcagaaagaggatgctggcgagcgctggggaactgcaaaagggcaacgaactggcgctgcccagcaagtacgtgaattttctgtacctggcgtcccactacgaaaagctgaaaggcagccccgaggacaacgagcagaagcagctgttcgtggagcagcacaagcattacctggacgagataatcgagcaaatcagcgagttcagcaagagggtgattctggccgacgcgaacctggataaggtcctcagcgcctacaacaagcaccgagacaaacccatcagggagcaggccgagaatatcatacacctgttcaccctgacaaatctgggcgcacctgcggcattcaaatacttcgataccaccatcgacaggaaaaggtacactagcactaaggaggtgctggatgccaccttgatccaccagtccattaccggcctgtatgagaccaggatcgacctgagccagcttggaggcgactctagggcggacccaaaaaagaaaaggaaggtggaattcgctggagacatgagagctgccaacctttggccaagcccgctcatgatcaaacgctctaagaagaacagcctggccttgtccctgacggccgaccagatggtcagtgccttgttggatgctgagccccccatactctattccgagtatgatcctaccagacccttcagtgaagcttcgatgatgggcttactgaccaacctggcagacagggagctggttcacatgatcaactgggcgaagagggtgccaggctttgtggatttgaccctccatgatcaggtccaccttcttgaatgtgcctggctagagatcctgatgattggtctcgtctggcgctccatggagcacccagtgaagctactgtttgctcctaacttgctcttggacaggaaccagggaaaatgtgtagagggcatggtggagatcttcgacatgctgctggctacatcatctcggttccgcatgatgaatctgcagggagaggagtttgtgtgcctcaaatctattattttgcttaattctggagtgtacacatttctgtccagcaccctgaagtctctggaagagaaggaccatatccaccgagtcctggacaagatcacagacactttgatccacctgatggccaaggcaggcctgaccctgcagcagcagcaccagcggctggcccagctcctcctcatcctctcccacatcaggcacatgagtaacaaaggcatggagcatctgtacagcatgaagtgcaagaacgtggtgcccctctatgacctgctgctggaggcggcggacgcccaccgcctacatgcgcccactagccgtggaggggcatccgtggaggagacggaccaaagccacttggccactgcgggctctacttcatcgcattccttgcaaaagtattacatcacgggggaggcagagggtttccctgccacagcttctagaggcagtggagagggcagaggaagtctgctaacatgcggtgacgtcgaggagaatcctggcccaatgaacctgagcaaaaacgtgagcgtgagcgtgtatatgaaggggaacgtcaacaatcatgagtttgagtacgacggggaaggtggtggtgatccttatacaggtaaatattccatgaagatgacgctacgtggtcaaaattccctacccttttcctatgatatcattaccacggcatttcagtatggtttccgcgtatttacaaaataccctgagggaattgttgactattttaaggactcgcttcccgacgcattccagtggaacagacgaattgtgtttgaagatggtggagtactaaacatgagcagtgatatcacatataaagataatgttctgcatggtgacgtcaaggctgagggagtgaacttcccgccgaatgggccagtgatgaagaatgaaattgtgatggaggaaccgactgaagaaacatttactccaaaaaacggggttcttgttggcttttgtcccaaagcgtacttacttaaagacggttcctattactatggaaatatgacaacattttacagatccaagaaatctggccaggcacctcctgggtatcactttgttaagcatcgtctcgtcaagaccaatgtgggacatggatttaagacggttgagcagactgaatatgccactgctcatgtcagtgatcttcccaagttcgaagcttga

SEQ ID NO: 57 - DNA, 6891 bp, Artificial sequence
  cloned, variant sequence 13
atgggcaagcccatccctaaccccctgttggggctggacagcaccgctcccaaaaagaaaaggaaggtgggcattcacggcgtgcctgcggccaccggtggaggctctgctggagacatgagagctgccaacctttggccaagcccgctcatgatcaaacgctctaagaagaacagcctggccttgtccctgacggccgaccagatggtcagtgccttgttggatgctgagccccccatactctattccgagtatgatcctaccagacccttcagtgaagcttcgatgatgggcttactgaccaacctggcagacagggagctggttcacatgatcaactgggcgaagagggtgccaggctttgtggatttgaccctccatgatcaggtccaccttcttgaatgtgcctggctagagatcctgatgattggtctcgtctggcgctccatggagcacccagtgaagctactgtttgctcctaacttgctcttggacaggaaccagggaaaatgtgtagagggcatggtggagatcttcgacatgctgctggctacatcatctcggttccgcatgatgaatctgcagggagaggagtttgtgtgcctcaaatctattattttgcttaattctggagtgtacacatttctgtccagcaccctgaagtctctggaagagaaggaccatatccaccgagtcctggacaagatcacagacactttgatccacctgatggccaaggcaggcctgaccctgcagcagcagcaccagcggctggcccagctcctcctcatcctctcccacatcaggcacatgagtaacaaaggcatggagcatctgtacagcatgaagtgcaagaacgtggtgcccctctatgacctgctgctggaggcggcggacgcccaccgcctacatgcgcccactagccgtggaggggcatccgtggaggagacggaccaaagccacttggccactgcgggctctacttcatcgcattccttgcaaaagtattacatcacgggggaggcagagggtttccctgccacagctacaccagaatcgggcgccgacaaaaagtacagcatcggccttgatatcggcaccaatagcgtgggctgggccgttatcacagacgaatacaaggtacccagcaagaagttcaaggtgctggggaatacagacaggcactctatcaagaaaaaccttatcggggctctgctgtttgactcaggcgagaccgccgaggccaccaggttgaagaggaccgcaaggcgaaggtacacccggaggaagaacaggatctgctatctgcaggagatcttcagcaacgagatggccaaggtggacgacagcttcttccacaggctggaggagagcttccttgtcgaggaggataagaagcacgaacgacaccccatcttcggcaacatagtcgacgaggtcgcttatcacgagaagtaccccaccatctaccacctgcgaaagaaattggtggatagcaccgataaagccgacttgcgacttatctacttggctctggcgcacatgattaagttcaggggccacttcctgatcgagggcgaccttaaccccgacaacagtgacgtagacaaattgttcatccagcttgtacagacctataaccagctgttcgaggaaaaccctattaacgccagcggggtggatgcgaaggccatacttagcgccaggctgagcaaaagcaggcgcttggagaacctgatagcccagctgcccggtgaaaagaagaacggcctcttcggtaatctgattgccctgagcctgggcctgacccccaacttcaagagcaacttcgacctggcagaagatgccaagctgcagttgagtaaggacacctatgacgacgacttggacaatctgctcgcccaaatcggcgaccagtacgctgacctgttcctcgccgccaagaacctttctgacgcaatcctgcttagcgatatccttagggtgaacacagagatcaccaaggcccccctgagcgccagcatgatcaagaggtacgacgagcaccatcaggacctgacccttctgaaggccctggtgaggcagcaactgcccgagaagtacaaggagatctttttcgaccagagcaagaacggctacgccggctacatcgacggcggagccagccaagaggagttctacaagttcatcaagcccatcctggagaagatggatggcaccgaggagctgctggtgaagctgaacagggaagatttgctccggaagcagaggacctttgacaacggtagcatcccccaccagatccacctgggcgagctgcacgcaatactgaggcgacaggaggatttctaccccttcctcaaggacaatagggagaaaatcgaaaagattctgaccttcaggatcccctactacgtgggccctcttgccaggggcaacagccgattcgcttggatgacaagaaagagcgaggagaccatcaccccctggaacttcgaggaagtggtggacaaaggagcaagcgcgcagtctttcatcgaacggatgaccaatttcgacaaaaacctgcctaacgagaaggtgctgcccaagcacagcctgctttacgagtacttcaccgtgtacaacgagctcaccaaggtgaaatatgtgaccgagggcatgcgaaaacccgctttcctgagcggcgagcagaagaaggccatcgtggacctgctgttcaagaccaacaggaaggtgaccgtgaagcagctgaaggaggactacttcaagaagatcgagtgctttgatagcgtggaaataagcggcgtggaggacaggttcaacgccagcctgggcacctaccacgacttgttgaagataatcaaagacaaggatttcctggataatgaggagaacgaggatatactcgaggacatcgtgctgactttgaccctgtttgaggaccgagagatgattgaagaaaggctcaaaacctacgcccacctgttcgacgacaaagtgatgaaacaactgaagagacgaagatacaccggctggggcagactgtccaggaagctcatcaacggcattagggacaagcagagcggcaagaccatcctggatttcctgaagtccgacggcttcgccaaccgaaacttcatgcagctgattcacgatgacagcttgaccttcaaggaggacatccagaaggcccaggttagcggccagggcgactccctgcacgaacatattgcaaacctggcaggctcccctgcgatcaagaagggcatactgcagaccgttaaggttgtggacgaattggtcaaggtcatgggcaggcacaagcccgaaaacatagttatagagatggccagagagaaccagaccacccaaaagggccagaagaacagccgggagcgcatgaaaaggatcgaggagggtatcaaggaactcggaagccagatcctcaaagagcaccccgtggagaatacccagctccagaacgagaagctgtacctgtactacctgcagaacggcagggacatgtacgttgaccaggagttggacatcaacaggctttcagactatgacgtggatcacatagtgccccagagctttcttaaagacgatagcatcgacaacaaggtcctgacccgctccgacaaaaacaggggcaaaagcgacaacgtgccaagcgaagaggtggttaaaaagatgaagaactactggaggcaactgctcaacgcgaaattgatcacccagagaaagttcgataacctgaccaaggccgagaggggcggactctccgaacttgacaaagcgggcttcataaagaggcagctggtcgagacccgacagatcacgaagcacgtggcccaaatcctcgacagcagaatgaataccaagtacgatgagaatgacaaactcatcagggaagtgaaagtgattaccctgaagagcaagttggtgtccgactttcgcaaagatttccagttctacaaggtgagggagatcaacaactaccaccatgcccacgacgcatacctgaacgccgtggtcggcaccgccctgattaagaagtatccaaagctggagtccgaatttgtctacggcgactacaaagtttacgatgtgaggaagatgatcgctaagagcgaacaggagatcggcaaggccaccgctaagtatttcttctacagcaacatcatgaactttttcaagaccgagatcacacttgccaacggcgaaatcaggaagaggccgcttatcgagaccaacggtgagaccggcgagatcgtgtgggacaagggcagggacttcgccaccgtgaggaaagtcctgagcatgccccaggtgaatattgtgaaaaaaactgaggtgcagacaggcggctttagcaaggaatccatcctgcccaagaggaacagcgacaagctgatcgcccggaagaaggactgggaccctaagaagtatggaggcttcgacagccccaccgtagcctacagcgtgctggtggtcgcgaaggtagagaaggggaagagcaagaaactgaagagcgtgaaggagctgctcggcataaccatcatggagaggtccagctttgagaagaaccccattgactttttggaagccaagggctacaaagaggtcaaaaaggacctgatcatcaaactccccaagtactccctgtttgaattggagaacggcagaaagaggatgctggcgagcgctggggaactgcaaaagggcaacgaactggcgctgcccagcaagtacgtgaattttctgtacctggcgtcccactacgaaaagctgaaaggcagccccgaggacaacgagcagaagcagctgttcgtggagcagcacaagcattacctggacgagataatcgagcaaatcagcgagttcagcaagagggtgattctggccgacgcgaacctggataaggtcctcagcgcctacaacaagcaccgagacaaacccatcagggagcaggccgagaatatcatacacctgttcaccctgacaaatctgggcgcacctgcggcattcaaatacttcgataccaccatcgacaggaaaaggtacactagcactaaggaggtgctggatgccaccttgatccaccagtccattaccggcctgtatgagaccaggatcgacctgagccagcttggaggcgactctagggcggacccaaaaaagaaaaggaaggtggaattcgctggagacatgagagctgccaacctttggccaagcccgctcatgatcaaacgctctaagaagaacagcctggccttgtccctgacggccgaccagatggtcagtgccttgttggatgctgagccccccatactctattccgagtatgatcctaccagacccttcagtgaagcttcgatgatgggcttactgaccaacctggcagacagggagctggttcacatgatcaactgggcgaagagggtgccaggctttgtggatttgaccctccatgatcaggtccaccttcttgaatgtgcctggctagagatcctgatgattggtctcgtctggcgctccatggagcacccagtgaagctactgtttgctcctaacttgctcttggacaggaaccagggaaaatgtgtagagggcatggtggagatcttcgacatgctgctggctacatcatctcggttccgcatgatgaatctgcagggagaggagtttgtgtgcctcaaatctattattttgcttaattctggagtgtacacatttctgtccagcaccctgaagtctctggaagagaaggaccatatccaccgagtcctggacaagatcacagacactttgatccacctgatggccaaggcaggcctgaccctgcagcagcagcaccagcggctggcccagctcctcctcatcctctcccacatcaggcacatgagtaacaaaggcatggagcatctgtacagcatgaagtgcaagaacgtggtgcccctctatgacctgctgctggaggcggcggacgcccaccgcctacatgcgcccactagccgtggaggggcatccgtggaggagacggaccaaagccacttggccactgcgggctctacttcatcgcattccttgcaaaagtattacatcacgggggaggcagagggtttccctgccacagcttctagaggcagtggagagggcagaggaagtctgctaacatgcggtgacgtcgaggagaatcctggcccaatgaacctgagcaaaaacgtgagcgtgagcgtgtatatgaaggggaacgtcaacaatcatgagtttgagtacgacggggaaggtggtggtgatccttatacaggtaaatattccatgaagatgacgctacgtggtcaaaattccctacccttttcctatgatatcattaccacggcatttcagtatggtttccgcgtatttacaaaataccctgagggaattgttgactattttaaggactcgcttcccgacgcattccagtggaacagacgaattgtgtttgaagatggtggagtactaaacatgagcagtgatatcacatataaagataatgttctgcatggtgacgtcaaggctgagggagtgaacttcccgccgaatgggccagtgatgaagaatgaaattgtgatggaggaaccgactgaagaaacatttactccaaaaaacggggttcttgttggcttttgtcccaaagcgtacttacttaaagacggttcctattactatggaaatatgacaacattttacagatccaagaaatctggccaggcacctcctgggtatcactttgttaagcatcgtctcgtcaagaccaatgtgggacatggatttaagacggttgagcagactgaatatgccactgctcatgtcagtgatcttcccaagttcgaagcttga

SEQ ID NO: 58 - DNA, 6912 bp, Artificial sequence
  cloned, variant sequence 14
atgggcaagcccatccctaaccccctgttggggctggacagcaccgctcccaaaaagaaaaggaaggtgggcattcacggcgtgcctgcggccaccggtcccgggggttccgctggagacaccaccggtcccgggggttccgctggagacatgagagctgccaacctttggccaagcccgctcatgatcaaacgctctaagaagaacagcctggccttgtccctgacggccgaccagatggtcagtgccttgttggatgctgagccccccatactctattccgagtatgatcctaccagacccttcagtgaagcttcgatgatgggcttactgaccaacctggcagacagggagctggttcacatgatcaactgggcgaagagggtgccaggctttgtggatttgaccctccatgatcaggtccaccttcttgaatgtgcctggctagagatcctgatgattggtctcgtctggcgctccatggagcacccagtgaagctactgtttgctcctaacttgctcttggacaggaaccagggaaaatgtgtagagggcatggtggagatcttcgacatgctgctggctacatcatctcggttccgcatgatgaatctgcagggagaggagtttgtgtgcctcaaatctattattttgcttaattctggagtgtacacatttctgtccagcaccctgaagtctctggaagagaaggaccatatccaccgagtcctggacaagatcacagacactttgatccacctgatggccaaggcaggcctgaccctgcagcagcagcaccagcggctggcccagctcctcctcatcctctcccacatcaggcacatgagtaacaaaggcatggagcatctgtacagcatgaagtgcaagaacgtggtgcccctctatgacctgctgctggaggcggcggacgcccaccgcctacatgcgcccactagccgtggaggggcatccgtggaggagacggaccaaagccacttggccactgcgggctctacttcatcgcattccttgcaaaagtattacatcacgggggaggcagagggtttccctgccacagctggcgccgacaaaaagtacagcatcggccttgatatcggcaccaatagcgtgggctgggccgttatcacagacgaatacaaggtacccagcaagaagttcaaggtgctggggaatacagacaggcactctatcaagaaaaaccttatcggggctctgctgtttgactcaggcgagaccgccgaggccaccaggttgaagaggaccgcaaggcgaaggtacacccggaggaagaacaggatctgctatctgcaggagatcttcagcaacgagatggccaaggtggacgacagcttcttccacaggctggaggagagcttccttgtcgaggaggataagaagcacgaacgacaccccatcttcggcaacatagtcgacgaggtcgcttatcacgagaagtaccccaccatctaccacctgcgaaagaaattggtggatagcaccgataaagccgacttgcgacttatctacttggctctggcgcacatgattaagttcaggggccacttcctgatcgagggcgaccttaaccccgacaacagtgacgtagacaaattgttcatccagcttgtacagacctataaccagctgttcgaggaaaaccctattaacgccagcggggtggatgcgaaggccatacttagcgccaggctgagcaaaagcaggcgcttggagaacctgatagcccagctgcccggtgaaaagaagaacggcctcttcggtaatctgattgccctgagcctgggcctgacccccaacttcaagagcaacttcgacctggcagaagatgccaagctgcagttgagtaaggacacctatgacgacgacttggacaatctgctcgcccaaatcggcgaccagtacgctgacctgttcctcgccgccaagaacctttctgacgcaatcctgcttagcgatatccttagggtgaacacagagatcaccaaggcccccctgagcgccagcatgatcaagaggtacgacgagcaccatcaggacctgacccttctgaaggccctggtgaggcagcaactgcccgagaagtacaaggagatctttttcgaccagagcaagaacggctacgccggctacatcgacggcggagccagccaagaggagttctacaagttcatcaagcccatcctggagaagatggatggcaccgaggagctgctggtgaagctgaacagggaagatttgctccggaagcagaggacctttgacaacggtagcatcccccaccagatccacctgggcgagctgcacgcaatactgaggcgacaggaggatttctaccccttcctcaaggacaatagggagaaaatcgaaaagattctgaccttcaggatcccctactacgtgggccctcttgccaggggcaacagccgattcgcttggatgacaagaaagagcgaggagaccatcaccccctggaacttcgaggaagtggtggacaaaggagcaagcgcgcagtctttcatcgaacggatgaccaatttcgacaaaaacctgcctaacgagaaggtgctgcccaagcacagcctgctttacgagtacttcaccgtgtacaacgagctcaccaaggtgaaatatgtgaccgagggcatgcgaaaacccgctttcctgagcggcgagcagaagaaggccatcgtggacctgctgttcaagaccaacaggaaggtgaccgtgaagcagctgaaggaggactacttcaagaagatcgagtgctttgatagcgtggaaataagcggcgtggaggacaggttcaacgccagcctgggcacctaccacgacttgttgaagataatcaaagacaaggatttcctggataatgaggagaacgaggatatactcgaggacatcgtgctgactttgaccctgtttgaggaccgagagatgattgaagaaaggctcaaaacctacgcccacctgttcgacgacaaagtgatgaaacaactgaagagacgaagatacaccggctggggcagactgtccaggaagctcatcaacggcattagggacaagcagagcggcaagaccatcctggatttcctgaagtccgacggcttcgccaaccgaaacttcatgcagctgattcacgatgacagcttgaccttcaaggaggacatccagaaggcccaggttagcggccagggcgactccctgcacgaacatattgcaaacctggcaggctcccctgcgatcaagaagggcatactgcagaccgttaaggttgtggacgaattggtcaaggtcatgggcaggcacaagcccgaaaacatagttatagagatggccagagagaaccagaccacccaaaagggccagaagaacagccgggagcgcatgaaaaggatcgaggagggtatcaaggaactcggaagccagatcctcaaagagcaccccgtggagaatacccagctccagaacgagaagctgtacctgtactacctgcagaacggcagggacatgtacgttgaccaggagttggacatcaacaggctttcagactatgacgtggatcacatagtgccccagagctttcttaaagacgatagcatcgacaacaaggtcctgacccgctccgacaaaaacaggggcaaaagcgacaacgtgccaagcgaagaggtggttaaaaagatgaagaactactggaggcaactgctcaacgcgaaattgatcacccagagaaagttcgataacctgaccaaggccgagaggggcggactctccgaacttgacaaagcgggcttcataaagaggcagctggtcgagacccgacagatcacgaagcacgtggcccaaatcctcgacagcagaatgaataccaagtacgatgagaatgacaaactcatcagggaagtgaaagtgattaccctgaagagcaagttggtgtccgactttcgcaaagatttccagttctacaaggtgagggagatcaacaactaccaccatgcccacgacgcatacctgaacgccgtggtcggcaccgccctgattaagaagtatccaaagctggagtccgaatttgtctacggcgactacaaagtttacgatgtgaggaagatgatcgctaagagcgaacaggagatcggcaaggccaccgctaagtatttcttctacagcaacatcatgaactttttcaagaccgagatcacacttgccaacggcgaaatcaggaagaggccgcttatcgagaccaacggtgagaccggcgagatcgtgtgggacaagggcagggacttcgccaccgtgaggaaagtcctgagcatgccccaggtgaatattgtgaaaaaaactgaggtgcagacaggcggctttagcaaggaatccatcctgcccaagaggaacagcgacaagctgatcgcccggaagaaggactgggaccctaagaagtatggaggcttcgacagccccaccgtagcctacagcgtgctggtggtcgcgaaggtagagaaggggaagagcaagaaactgaagagcgtgaaggagctgctcggcataaccatcatggagaggtccagctttgagaagaaccccattgactttttggaagccaagggctacaaagaggtcaaaaaggacctgatcatcaaactccccaagtactccctgtttgaattggagaacggcagaaagaggatgctggcgagcgctggggaactgcaaaagggcaacgaactggcgctgcccagcaagtacgtgaattttctgtacctggcgtcccactacgaaaagctgaaaggcagccccgaggacaacgagcagaagcagctgttcgtggagcagcacaagcattacctggacgagataatcgagcaaatcagcgagttcagcaagagggtgattctggccgacgcgaacctggataaggtcctcagcgcctacaacaagcaccgagacaaacccatcagggagcaggccgagaatatcatacacctgttcaccctgacaaatctgggcgcacctgcggcattcaaatacttcgataccaccatcgacaggaaaaggtacactagcactaaggaggtgctggatgccaccttgatccaccagtccattaccggcctgtatgagaccaggatcgacctgagccagcttggaggcgactctagggcggacccaaaaaagaaaaggaaggtggaattcgctggagacatgagagctgccaacctttggccaagcccgctcatgatcaaacgctctaagaagaacagcctggccttgtccctgacggccgaccagatggtcagtgccttgttggatgctgagccccccatactctattccgagtatgatcctaccagacccttcagtgaagcttcgatgatgggcttactgaccaacctggcagacagggagctggttcacatgatcaactgggcgaagagggtgccaggctttgtggatttgaccctccatgatcaggtccaccttcttgaatgtgcctggctagagatcctgatgattggtctcgtctggcgctccatggagcacccagtgaagctactgtttgctcctaacttgctcttggacaggaaccagggaaaatgtgtagagggcatggtggagatcttcgacatgctgctggctacatcatctcggttccgcatgatgaatctgcagggagaggagtttgtgtgcctcaaatctattattttgcttaattctggagtgtacacatttctgtccagcaccctgaagtctctggaagagaaggaccatatccaccgagtcctggacaagatcacagacactttgatccacctgatggccaaggcaggcctgaccctgcagcagcagcaccagcggctggcccagctcctcctcatcctctcccacatcaggcacatgagtaacaaaggcatggagcatctgtacagcatgaagtgcaagaacgtggtgcccctctatgacctgctgctggaggcggcggacgcccaccgcctacatgcgcccactagccgtggaggggcatccgtggaggagacggaccaaagccacttggccactgcgggctctacttcatcgcattccttgcaaaagtattacatcacgggggaggcagagggtttccctgccacagcttctagaggcagtggagagggcagaggaagtctgctaacatgcggtgacgtcgaggagaatcctggcccaatgaacctgagcaaaaacgtgagcgtgagcgtgtatatgaaggggaacgtcaacaatcatgagtttgagtacgacggggaaggtggtggtgatccttatacaggtaaatattccatgaagatgacgctacgtggtcaaaattccctacccttttcctatgatatcattaccacggcatttcagtatggtttccgcgtatttacaaaataccctgagggaattgttgactattttaaggactcgcttcccgacgcattccagtggaacagacgaattgtgtttgaagatggtggagtactaaacatgagcagtgatatcacatataaagataatgttctgcatggtgacgtcaaggctgagggagtgaacttcccgccgaatgggccagtgatgaagaatgaaattgtgatggaggaaccgactgaagaaacatttactccaaaaaacggggttcttgttggcttttgtcccaaagcgtacttacttaaagacggttcctattactatggaaatatgacaacattttacagatccaagaaatctggccaggcacctcctgggtatcactttgttaagcatcgtctcgtcaagaccaatgtgggacatggatttaagacggttgagcagactgaatatgccactgctcatgtcagtgatcttcccaagttcgaagcttga

SEQ ID NO: 59 - DNA, 6903 bp, Artificial sequence
  cloned, variant sequence 15
atgggcaagcccatccctaaccccctgttggggctggacagcaccgctcccaaaaagaaaaggaaggtgggcattcacggcgtgcctgcggccaccggtggaggatctgctggagacatgagagctgccaacctttggccaagcccgctcatgatcaaacgctctaagaagaacagcctggccttgtccctgacggccgaccagatggtcagtgccttgttggatgctgagccccccatactctattccgagtatgatcctaccagacccttcagtgaagcttcgatgatgggcttactgaccaacctggcagacagggagctggttcacatgatcaactgggcgaagagggtgccaggctttgtggatttgaccctccatgatcaggtccaccttcttgaatgtgcctggctagagatcctgatgattggtctcgtctggcgctccatggagcacccagtgaagctactgtttgctcctaacttgctcttggacaggaaccagggaaaatgtgtagagggcatggtggagatcttcgacatgctgctggctacatcatctcggttccgcatgatgaatctgcagggagaggagtttgtgtgcctcaaatctattattttgcttaattctggagtgtacacatttctgtccagcaccctgaagtctctggaagagaaggaccatatccaccgagtcctggacaagatcacagacactttgatccacctgatggccaaggcaggcctgaccctgcagcagcagcaccagcggctggcccagctcctcctcatcctctcccacatcaggcacatgagtaacaaaggcatggagcatctgtacagcatgaagtgcaagaacgtggtgcccctctatgacctgctgctggaggcggcggacgcccaccgcctacatgcgcccactagccgtggaggggcatccgtggaggagacggaccaaagccacttggccactgcgggctctacttcatcgcattccttgcaaaagtattacatcacgggggaggcagagggtttccctgccacagcttcagagtccgccacaccagaatcgggcgccgacaaaaagtacagcatcggccttgatatcggcaccaatagcgtgggctgggccgttatcacagacgaatacaaggtacccagcaagaagttcaaggtgctggggaatacagacaggcactctatcaagaaaaaccttatcggggctctgctgtttgactcaggcgagaccgccgaggccaccaggttgaagaggaccgcaaggcgaaggtacacccggaggaagaacaggatctgctatctgcaggagatcttcagcaacgagatggccaaggtggacgacagcttcttccacaggctggaggagagcttccttgtcgaggaggataagaagcacgaacgacaccccatcttcggcaacatagtcgacgaggtcgcttatcacgagaagtaccccaccatctaccacctgcgaaagaaattggtggatagcaccgataaagccgacttgcgacttatctacttggctctggcgcacatgattaagttcaggggccacttcctgatcgagggcgaccttaaccccgacaacagtgacgtagacaaattgttcatccagcttgtacagacctataaccagctgttcgaggaaaaccctattaacgccagcggggtggatgcgaaggccatacttagcgccaggctgagcaaaagcaggcgcttggagaacctgatagcccagctgcccggtgaaaagaagaacggcctcttcggtaatctgattgccctgagcctgggcctgacccccaacttcaagagcaacttcgacctggcagaagatgccaagctgcagttgagtaaggacacctatgacgacgacttggacaatctgctcgcccaaatcggcgaccagtacgctgacctgttcctcgccgccaagaacctttctgacgcaatcctgcttagcgatatccttagggtgaacacagagatcaccaaggcccccctgagcgccagcatgatcaagaggtacgacgagcaccatcaggacctgacccttctgaaggccctggtgaggcagcaactgcccgagaagtacaaggagatctttttcgaccagagcaagaacggctacgccggctacatcgacggcggagccagccaagaggagttctacaagttcatcaagcccatcctggagaagatggatggcaccgaggagctgctggtgaagctgaacagggaagatttgctccggaagcagaggacctttgacaacggtagcatcccccaccagatccacctgggcgagctgcacgcaatactgaggcgacaggaggatttctaccccttcctcaaggacaatagggagaaaatcgaaaagattctgaccttcaggatcccctactacgtgggccctcttgccaggggcaacagccgattcgcttggatgacaagaaagagcgaggagaccatcaccccctggaacttcgaggaagtggtggacaaaggagcaagcgcgcagtctttcatcgaacggatgaccaatttcgacaaaaacctgcctaacgagaaggtgctgcccaagcacagcctgctttacgagtacttcaccgtgtacaacgagctcaccaaggtgaaatatgtgaccgagggcatgcgaaaacccgctttcctgagcggcgagcagaagaaggccatcgtggacctgctgttcaagaccaacaggaaggtgaccgtgaagcagctgaaggaggactacttcaagaagatcgagtgctttgatagcgtggaaataagcggcgtggaggacaggttcaacgccagcctgggcacctaccacgacttgttgaagataatcaaagacaaggatttcctggataatgaggagaacgaggatatactcgaggacatcgtgctgactttgaccctgtttgaggaccgagagatgattgaagaaaggctcaaaacctacgcccacctgttcgacgacaaagtgatgaaacaactgaagagacgaagatacaccggctggggcagactgtccaggaagctcatcaacggcattagggacaagcagagcggcaagaccatcctggatttcctgaagtccgacggcttcgccaaccgaaacttcatgcagctgattcacgatgacagcttgaccttcaaggaggacatccagaaggcccaggttagcggccagggcgactccctgcacgaacatattgcaaacctggcaggctcccctgcgatcaagaagggcatactgcagaccgttaaggttgtggacgaattggtcaaggtcatgggcaggcacaagcccgaaaacatagttatagagatggccagagagaaccagaccacccaaaagggccagaagaacagccgggagcgcatgaaaaggatcgaggagggtatcaaggaactcggaagccagatcctcaaagagcaccccgtggagaatacccagctccagaacgagaagctgtacctgtactacctgcagaacggcagggacatgtacgttgaccaggagttggacatcaacaggctttcagactatgacgtggatcacatagtgccccagagctttcttaaagacgatagcatcgacaacaaggtcctgacccgctccgacaaaaacaggggcaaaagcgacaacgtgccaagcgaagaggtggttaaaaagatgaagaactactggaggcaactgctcaacgcgaaattgatcacccagagaaagttcgataacctgaccaaggccgagaggggcggactctccgaacttgacaaagcgggcttcataaagaggcagctggtcgagacccgacagatcacgaagcacgtggcccaaatcctcgacagcagaatgaataccaagtacgatgagaatgacaaactcatcagggaagtgaaagtgattaccctgaagagcaagttggtgtccgactttcgcaaagatttccagttctacaaggtgagggagatcaacaactaccaccatgcccacgacgcatacctgaacgccgtggtcggcaccgccctgattaagaagtatccaaagctggagtccgaatttgtctacggcgactacaaagtttacgatgtgaggaagatgatcgctaagagcgaacaggagatcggcaaggccaccgctaagtatttcttctacagcaacatcatgaactttttcaagaccgagatcacacttgccaacggcgaaatcaggaagaggccgcttatcgagaccaacggtgagaccggcgagatcgtgtgggacaagggcagggacttcgccaccgtgaggaaagtcctgagcatgccccaggtgaatattgtgaaaaaaactgaggtgcagacaggcggctttagcaaggaatccatcctgcccaagaggaacagcgacaagctgatcgcccggaagaaggactgggaccctaagaagtatggaggcttcgacagccccaccgtagcctacagcgtgctggtggtcgcgaaggtagagaaggggaagagcaagaaactgaagagcgtgaaggagctgctcggcataaccatcatggagaggtccagctttgagaagaaccccattgactttttggaagccaagggctacaaagaggtcaaaaaggacctgatcatcaaactccccaagtactccctgtttgaattggagaacggcagaaagaggatgctggcgagcgctggggaactgcaaaagggcaacgaactggcgctgcccagcaagtacgtgaattttctgtacctggcgtcccactacgaaaagctgaaaggcagccccgaggacaacgagcagaagcagctgttcgtggagcagcacaagcattacctggacgagataatcgagcaaatcagcgagttcagcaagagggtgattctggccgacgcgaacctggataaggtcctcagcgcctacaacaagcaccgagacaaacccatcagggagcaggccgagaatatcatacacctgttcaccctgacaaatctgggcgcacctgcggcattcaaatacttcgataccaccatcgacaggaaaaggtacactagcactaaggaggtgctggatgccaccttgatccaccagtccattaccggcctgtatgagaccaggatcgacctgagccagcttggaggcgactctagggcggacccaaaaaagaaaaggaaggtggaattcgctggagacatgagagctgccaacctttggccaagcccgctcatgatcaaacgctctaagaagaacagcctggccttgtccctgacggccgaccagatggtcagtgccttgttggatgctgagccccccatactctattccgagtatgatcctaccagacccttcagtgaagcttcgatgatgggcttactgaccaacctggcagacagggagctggttcacatgatcaactgggcgaagagggtgccaggctttgtggatttgaccctccatgatcaggtccaccttcttgaatgtgcctggctagagatcctgatgattggtctcgtctggcgctccatggagcacccagtgaagctactgtttgctcctaacttgctcttggacaggaaccagggaaaatgtgtagagggcatggtggagatcttcgacatgctgctggctacatcatctcggttccgcatgatgaatctgcagggagaggagtttgtgtgcctcaaatctattattttgcttaattctggagtgtacacatttctgtccagcaccctgaagtctctggaagagaaggaccatatccaccgagtcctggacaagatcacagacactttgatccacctgatggccaaggcaggcctgaccctgcagcagcagcaccagcggctggcccagctcctcctcatcctctcccacatcaggcacatgagtaacaaaggcatggagcatctgtacagcatgaagtgcaagaacgtggtgcccctctatgacctgctgctggaggcggcggacgcccaccgcctacatgcgcccactagccgtggaggggcatccgtggaggagacggaccaaagccacttggccactgcgggctctacttcatcgcattccttgcaaaagtattacatcacgggggaggcagagggtttccctgccacagcttctagaggcagtggagagggcagaggaagtctgctaacatgcggtgacgtcgaggagaatcctggcccaatgaacctgagcaaaaacgtgagcgtgagcgtgtatatgaaggggaacgtcaacaatcatgagtttgagtacgacggggaaggtggtggtgatccttatacaggtaaatattccatgaagatgacgctacgtggtcaaaattccctacccttttcctatgatatcattaccacggcatttcagtatggtttccgcgtatttacaaaataccctgagggaattgttgactattttaaggactcgcttcccgacgcattccagtggaacagacgaattgtgtttgaagatggtggagtactaaacatgagcagtgatatcacatataaagataatgttctgcatggtgacgtcaaggctgagggagtgaacttcccgccgaatgggccagtgatgaagaatgaaattgtgatggaggaaccgactgaagaaacatttactccaaaaaacggggttcttgttggcttttgtcccaaagcgtacttacttaaagacggttcctattactatggaaatatgacaacattttacagatccaagaaatctggccaggcacctcctgggtatcactttgttaagcatcgtctcgtcaagaccaatgtgggacatggatttaagacggttgagcagactgaatatgccactgctcatgtcagtgatcttcccaagttcgaagcttga

SEQ ID NO: 60 - DNA, 6891 bp, Artificial sequence
  cloned, variant sequence 16
atgggcaagcccatccctaaccccctgttggggctggacagcaccgctcccaaaaagaaaaggaaggtgggcattcacggcgtgcctgcggccaccggtggaggatctgctggagacatgagagctgccaacctttggccaagcccgctcatgatcaaacgctctaagaagaacagcctggccttgtccctgacggccgaccagatggtcagtgccttgttggatgctgagccccccatactctattccgagtatgatcctaccagacccttcagtgaagcttcgatgatgggcttactgaccaacctggcagacagggagctggttcacatgatcaactgggcgaagagggtgccaggctttgtggatttgaccctccatgatcaggtccaccttcttgaatgtgcctggctagagatcctgatgattggtctcgtctggcgctccatggagcacccagtgaagctactgtttgctcctaacttgctcttggacaggaaccagggaaaatgtgtagagggcatggtggagatcttcgacatgctgctggctacatcatctcggttccgcatgatgaatctgcagggagaggagtttgtgtgcctcaaatctattattttgcttaattctggagtgtacacatttctgtccagcaccctgaagtctctggaagagaaggaccatatccaccgagtcctggacaagatcacagacactttgatccacctgatggccaaggcaggcctgaccctgcagcagcagcaccagcggctggcccagctcctcctcatcctctcccacatcaggcacatgagtaacaaaggcatggagcatctgtacagcatgaagtgcaagaacgtggtgcccctctatgacctgctgctggaggcggcggacgcccaccgcctacatgcgcccactagccgtggaggggcatccgtggaggagacggaccaaagccacttggccactgcgggctctacttcatcgcattccttgcaaaagtattacatcacgggggaggcagagggtttccctgccacagcttccggatctgaaggcgccgacaaaaagtacagcatcggccttgatatcggcaccaatagcgtgggctgggccgttatcacagacgaatacaaggtacccagcaagaagttcaaggtgctggggaatacagacaggcactctatcaagaaaaaccttatcggggctctgctgtttgactcaggcgagaccgccgaggccaccaggttgaagaggaccgcaaggcgaaggtacacccggaggaagaacaggatctgctatctgcaggagatcttcagcaacgagatggccaaggtggacgacagcttcttccacaggctggaggagagcttccttgtcgaggaggataagaagcacgaacgacaccccatcttcggcaacatagtcgacgaggtcgcttatcacgagaagtaccccaccatctaccacctgcgaaagaaattggtggatagcaccgataaagccgacttgcgacttatctacttggctctggcgcacatgattaagttcaggggccacttcctgatcgagggcgaccttaaccccgacaacagtgacgtagacaaattgttcatccagcttgtacagacctataaccagctgttcgaggaaaaccctattaacgccagcggggtggatgcgaaggccatacttagcgccaggctgagcaaaagcaggcgcttggagaacctgatagcccagctgcccggtgaaaagaagaacggcctcttcggtaatctgattgccctgagcctgggcctgacccccaacttcaagagcaacttcgacctggcagaagatgccaagctgcagttgagtaaggacacctatgacgacgacttggacaatctgctcgcccaaatcggcgaccagtacgctgacctgttcctcgccgccaagaacctttctgacgcaatcctgcttagcgatatccttagggtgaacacagagatcaccaaggcccccctgagcgccagcatgatcaagaggtacgacgagcaccatcaggacctgacccttctgaaggccctggtgaggcagcaactgcccgagaagtacaaggagatctttttcgaccagagcaagaacggctacgccggctacatcgacggcggagccagccaagaggagttctacaagttcatcaagcccatcctggagaagatggatggcaccgaggagctgctggtgaagctgaacagggaagatttgctccggaagcagaggacctttgacaacggtagcatcccccaccagatccacctgggcgagctgcacgcaatactgaggcgacaggaggatttctaccccttcctcaaggacaatagggagaaaatcgaaaagattctgaccttcaggatcccctactacgtgggccctcttgccaggggcaacagccgattcgcttggatgacaagaaagagcgaggagaccatcaccccctggaacttcgaggaagtggtggacaaaggagcaagcgcgcagtctttcatcgaacggatgaccaatttcgacaaaaacctgcctaacgagaaggtgctgcccaagcacagcctgctttacgagtacttcaccgtgtacaacgagctcaccaaggtgaaatatgtgaccgagggcatgcgaaaacccgctttcctgagcggcgagcagaagaaggccatcgtggacctgctgttcaagaccaacaggaaggtgaccgtgaagcagctgaaggaggactacttcaagaagatcgagtgctttgatagcgtggaaataagcggcgtggaggacaggttcaacgccagcctgggcacctaccacgacttgttgaagataatcaaagacaaggatttcctggataatgaggagaacgaggatatactcgaggacatcgtgctgactttgaccctgtttgaggaccgagagatgattgaagaaaggctcaaaacctacgcccacctgttcgacgacaaagtgatgaaacaactgaagagacgaagatacaccggctggggcagactgtccaggaagctcatcaacggcattagggacaagcagagcggcaagaccatcctggatttcctgaagtccgacggcttcgccaaccgaaacttcatgcagctgattcacgatgacagcttgaccttcaaggaggacatccagaaggcccaggttagcggccagggcgactccctgcacgaacatattgcaaacctggcaggctcccctgcgatcaagaagggcatactgcagaccgttaaggttgtggacgaattggtcaaggtcatgggcaggcacaagcccgaaaacatagttatagagatggccagagagaaccagaccacccaaaagggccagaagaacagccgggagcgcatgaaaaggatcgaggagggtatcaaggaactcggaagccagatcctcaaagagcaccccgtggagaatacccagctccagaacgagaagctgtacctgtactacctgcagaacggcagggacatgtacgttgaccaggagttggacatcaacaggctttcagactatgacgtggatcacatagtgccccagagctttcttaaagacgatagcatcgacaacaaggtcctgacccgctccgacaaaaacaggggcaaaagcgacaacgtgccaagcgaagaggtggttaaaaagatgaagaactactggaggcaactgctcaacgcgaaattgatcacccagagaaagttcgataacctgaccaaggccgagaggggcggactctccgaacttgacaaagcgggcttcataaagaggcagctggtcgagacccgacagatcacgaagcacgtggcccaaatcctcgacagcagaatgaataccaagtacgatgagaatgacaaactcatcagggaagtgaaagtgattaccctgaagagcaagttggtgtccgactttcgcaaagatttccagttctacaaggtgagggagatcaacaactaccaccatgcccacgacgcatacctgaacgccgtggtcggcaccgccctgattaagaagtatccaaagctggagtccgaatttgtctacggcgactacaaagtttacgatgtgaggaagatgatcgctaagagcgaacaggagatcggcaaggccaccgctaagtatttcttctacagcaacatcatgaactttttcaagaccgagatcacacttgccaacggcgaaatcaggaagaggccgcttatcgagaccaacggtgagaccggcgagatcgtgtgggacaagggcagggacttcgccaccgtgaggaaagtcctgagcatgccccaggtgaatattgtgaaaaaaactgaggtgcagacaggcggctttagcaaggaatccatcctgcccaagaggaacagcgacaagctgatcgcccggaagaaggactgggaccctaagaagtatggaggcttcgacagccccaccgtagcctacagcgtgctggtggtcgcgaaggtagagaaggggaagagcaagaaactgaagagcgtgaaggagctgctcggcataaccatcatggagaggtccagctttgagaagaaccccattgactttttggaagccaagggctacaaagaggtcaaaaaggacctgatcatcaaactccccaagtactccctgtttgaattggagaacggcagaaagaggatgctggcgagcgctggggaactgcaaaagggcaacgaactggcgctgcccagcaagtacgtgaattttctgtacctggcgtcccactacgaaaagctgaaaggcagccccgaggacaacgagcagaagcagctgttcgtggagcagcacaagcattacctggacgagataatcgagcaaatcagcgagttcagcaagagggtgattctggccgacgcgaacctggataaggtcctcagcgcctacaacaagcaccgagacaaacccatcagggagcaggccgagaatatcatacacctgttcaccctgacaaatctgggcgcacctgcggcattcaaatacttcgataccaccatcgacaggaaaaggtacactagcactaaggaggtgctggatgccaccttgatccaccagtccattaccggcctgtatgagaccaggatcgacctgagccagcttggaggcgactctagggcggacccaaaaaagaaaaggaaggtggaattcgctggagacatgagagctgccaacctttggccaagcccgctcatgatcaaacgctctaagaagaacagcctggccttgtccctgacggccgaccagatggtcagtgccttgttggatgctgagccccccatactctattccgagtatgatcctaccagacccttcagtgaagcttcgatgatgggcttactgaccaacctggcagacagggagctggttcacatgatcaactgggcgaagagggtgccaggctttgtggatttgaccctccatgatcaggtccaccttcttgaatgtgcctggctagagatcctgatgattggtctcgtctggcgctccatggagcacccagtgaagctactgtttgctcctaacttgctcttggacaggaaccagggaaaatgtgtagagggcatggtggagatcttcgacatgctgctggctacatcatctcggttccgcatgatgaatctgcagggagaggagtttgtgtgcctcaaatctattattttgcttaattctggagtgtacacatttctgtccagcaccctgaagtctctggaagagaaggaccatatccaccgagtcctggacaagatcacagacactttgatccacctgatggccaaggcaggcctgaccctgcagcagcagcaccagcggctggcccagctcctcctcatcctctcccacatcaggcacatgagtaacaaaggcatggagcatctgtacagcatgaagtgcaagaacgtggtgcccctctatgacctgctgctggaggcggcggacgcccaccgcctacatgcgcccactagccgtggaggggcatccgtggaggagacggaccaaagccacttggccactgcgggctctacttcatcgcattccttgcaaaagtattacatcacgggggaggcagagggtttccctgccacagcttctagaggcagtggagagggcagaggaagtctgctaacatgcggtgacgtcgaggagaatcctggcccaatgaacctgagcaaaaacgtgagcgtgagcgtgtatatgaaggggaacgtcaacaatcatgagtttgagtacgacggggaaggtggtggtgatccttatacaggtaaatattccatgaagatgacgctacgtggtcaaaattccctacccttttcctatgatatcattaccacggcatttcagtatggtttccgcgtatttacaaaataccctgagggaattgttgactattttaaggactcgcttcccgacgcattccagtggaacagacgaattgtgtttgaagatggtggagtactaaacatgagcagtgatatcacatataaagataatgttctgcatggtgacgtcaaggctgagggagtgaacttcccgccgaatgggccagtgatgaagaatgaaattgtgatggaggaaccgactgaagaaacatttactccaaaaaacggggttcttgttggcttttgtcccaaagcgtacttacttaaagacggttcctattactatggaaatatgacaacattttacagatccaagaaatctggccaggcacctcctgggtatcactttgttaagcatcgtctcgtcaagaccaatgtgggacatggatttaagacggttgagcagactgaatatgccactgctcatgtcagtgatcttcccaagttcgaagcttga

SEQ ID NO: 61 - DNA, 6870 bp, Artificial sequence
  cloned, variant sequence 17
atgggcaagcccatccctaaccccctgttggggctggacagcaccgctcccaaaaagaaaaggaaggtgggcattcacggcgtgcctgcggccaccggtgctggagacatgagagctgccaacctttggccaagcccgctcatgatcaaacgctctaagaagaacagcctggccttgtccctgacggccgaccagatggtcagtgccttgttggatgctgagccccccatactctattccgagtatgatcctaccagacccttcagtgaagcttcgatgatgggcttactgaccaacctggcagacagggagctggttcacatgatcaactgggcgaagagggtgccaggctttgtggatttgaccctccatgatcaggtccaccttcttgaatgtgcctggctagagatcctgatgattggtctcgtctggcgctccatggagcacccagtgaagctactgtttgctcctaacttgctcttggacaggaaccagggaaaatgtgtagagggcatggtggagatcttcgacatgctgctggctacatcatctcggttccgcatgatgaatctgcagggagaggagtttgtgtgcctcaaatctattattttgcttaattctggagtgtacacatttctgtccagcaccctgaagtctctggaagagaaggaccatatccaccgagtcctggacaagatcacagacactttgatccacctgatggccaaggcaggcctgaccctgcagcagcagcaccagcggctggcccagctcctcctcatcctctcccacatcaggcacatgagtaacaaaggcatggagcatctgtacagcatgaagtgcaagaacgtggtgcccctctatgacctgctgctggaggcggcggacgcccaccgcctacatgcgcccactagccgtggaggggcatccgtggaggagacggaccaaagccacttggccactgcgggctctacttcatcgcattccttgcaaaagtattacatcacgggggaggcagagggtttccctgccacagctcccggggacaaaaagtacagcatcggccttgatatcggcaccaatagcgtgggctgggccgttatcacagacgaatacaaggtacccagcaagaagttcaaggtgctggggaatacagacaggcactctatcaagaaaaaccttatcggggctctgctgtttgactcaggcgagaccgccgaggccaccaggttgaagaggaccgcaaggcgaaggtacacccggaggaagaacaggatctgctatctgcaggagatcttcagcaacgagatggccaaggtggacgacagcttcttccacaggctggaggagagcttccttgtcgaggaggataagaagcacgaacgacaccccatcttcggcaacatagtcgacgaggtcgcttatcacgagaagtaccccaccatctaccacctgcgaaagaaattggtggatagcaccgataaagccgacttgcgacttatctacttggctctggcgcacatgattaagttcaggggccacttcctgatcgagggcgaccttaaccccgacaacagtgacgtagacaaattgttcatccagcttgtacagacctataaccagctgttcgaggaaaaccctattaacgccagcggggtggatgcgaaggccatacttagcgccaggctgagcaaaagcaggcgcttggagaacctgatagcccagctgcccggtgaaaagaagaacggcctcttcggtaatctgattgccctgagcctgggcctgacccccaacttcaagagcaacttcgacctggcagaagatgccaagctgcagttgagtaaggacacctatgacgacgacttggacaatctgctcgcccaaatcggcgaccagtacgctgacctgttcctcgccgccaagaacctttctgacgcaatcctgcttagcgatatccttagggtgaacacagagatcaccaaggcccccctgagcgccagcatgatcaagaggtacgacgagcaccatcaggacctgacccttctgaaggccctggtgaggcagcaactgcccgagaagtacaaggagatctttttcgaccagagcaagaacggctacgccggctacatcgacggcggagccagccaagaggagttctacaagttcatcaagcccatcctggagaagatggatggcaccgaggagctgctggtgaagctgaacagggaagatttgctccggaagcagaggacctttgacaacggtagcatcccccaccagatccacctgggcgagctgcacgcaatactgaggcgacaggaggatttctaccccttcctcaaggacaatagggagaaaatcgaaaagattctgaccttcaggatcccctactacgtgggccctcttgccaggggcaacagccgattcgcttggatgacaagaaagagcgaggagaccatcaccccctggaacttcgaggaagtggtggacaaaggagcaagcgcgcagtctttcatcgaacggatgaccaatttcgacaaaaacctgcctaacgagaaggtgctgcccaagcacagcctgctttacgagtacttcaccgtgtacaacgagctcaccaaggtgaaatatgtgaccgagggcatgcgaaaacccgctttcctgagcggcgagcagaagaaggccatcgtggacctgctgttcaagaccaacaggaaggtgaccgtgaagcagctgaaggaggactacttcaagaagatcgagtgctttgatagcgtggaaataagcggcgtggaggacaggttcaacgccagcctgggcacctaccacgacttgttgaagataatcaaagacaaggatttcctggataatgaggagaacgaggatatactcgaggacatcgtgctgactttgaccctgtttgaggaccgagagatgattgaagaaaggctcaaaacctacgcccacctgttcgacgacaaagtgatgaaacaactgaagagacgaagatacaccggctggggcagactgtccaggaagctcatcaacggcattagggacaagcagagcggcaagaccatcctggatttcctgaagtccgacggcttcgccaaccgaaacttcatgcagctgattcacgatgacagcttgaccttcaaggaggacatccagaaggcccaggttagcggccagggcgactccctgcacgaacatattgcaaacctggcaggctcccctgcgatcaagaagggcatactgcagaccgttaaggttgtggacgaattggtcaaggtcatgggcaggcacaagcccgaaaacatagttatagagatggccagagagaaccagaccacccaaaagggccagaagaacagccgggagcgcatgaaaaggatcgaggagggtatcaaggaactcggaagccagatcctcaaagagcaccccgtggagaatacccagctccagaacgagaagctgtacctgtactacctgcagaacggcagggacatgtacgttgaccaggagttggacatcaacaggctttcagactatgacgtggatcacatagtgccccagagctttcttaaagacgatagcatcgacaacaaggtcctgacccgctccgacaaaaacaggggcaaaagcgacaacgtgccaagcgaagaggtggttaaaaagatgaagaactactggaggcaactgctcaacgcgaaattgatcacccagagaaagttcgataacctgaccaaggccgagaggggcggactctccgaacttgacaaagcgggcttcataaagaggcagctggtcgagacccgacagatcacgaagcacgtggcccaaatcctcgacagcagaatgaataccaagtacgatgagaatgacaaactcatcagggaagtgaaagtgattaccctgaagagcaagttggtgtccgactttcgcaaagatttccagttctacaaggtgagggagatcaacaactaccaccatgcccacgacgcatacctgaacgccgtggtcggcaccgccctgattaagaagtatccaaagctggagtccgaatttgtctacggcgactacaaagtttacgatgtgaggaagatgatcgctaagagcgaacaggagatcggcaaggccaccgctaagtatttcttctacagcaacatcatgaactttttcaagaccgagatcacacttgccaacggcgaaatcaggaagaggccgcttatcgagaccaacggtgagaccggcgagatcgtgtgggacaagggcagggacttcgccaccgtgaggaaagtcctgagcatgccccaggtgaatattgtgaaaaaaactgaggtgcagacaggcggctttagcaaggaatccatcctgcccaagaggaacagcgacaagctgatcgcccggaagaaggactgggaccctaagaagtatggaggcttcgacagccccaccgtagcctacagcgtgctggtggtcgcgaaggtagagaaggggaagagcaagaaactgaagagcgtgaaggagctgctcggcataaccatcatggagaggtccagctttgagaagaaccccattgactttttggaagccaagggctacaaagaggtcaaaaaggacctgatcatcaaactccccaagtactccctgtttgaattggagaacggcagaaagaggatgctggcgagcgctggggaactgcaaaagggcaacgaactggcgctgcccagcaagtacgtgaattttctgtacctggcgtcccactacgaaaagctgaaaggcagccccgaggacaacgagcagaagcagctgttcgtggagcagcacaagcattacctggacgagataatcgagcaaatcagcgagttcagcaagagggtgattctggccgacgcgaacctggataaggtcctcagcgcctacaacaagcaccgagacaaacccatcagggagcaggccgagaatatcatacacctgttcaccctgacaaatctgggcgcacctgcggcattcaaatacttcgataccaccatcgacaggaaaaggtacactagcactaaggaggtgctggatgccaccttgatccaccagtccattaccggcctgtatgagaccaggatcgacctgagccagcttggaggcgactctagggcggacccaaaaaagaaaaggaaggtggaattcgctggagacatgagagctgccaacctttggccaagcccgctcatgatcaaacgctctaagaagaacagcctggccttgtccctgacggccgaccagatggtcagtgccttgttggatgctgagccccccatactctattccgagtatgatcctaccagacccttcagtgaagcttcgatgatgggcttactgaccaacctggcagacagggagctggttcacatgatcaactgggcgaagagggtgccaggctttgtggatttgaccctccatgatcaggtccaccttcttgaatgtgcctggctagagatcctgatgattggtctcgtctggcgctccatggagcacccagtgaagctactgtttgctcctaacttgctcttggacaggaaccagggaaaatgtgtagagggcatggtggagatcttcgacatgctgctggctacatcatctcggttccgcatgatgaatctgcagggagaggagtttgtgtgcctcaaatctattattttgcttaattctggagtgtacacatttctgtccagcaccctgaagtctctggaagagaaggaccatatccaccgagtcctggacaagatcacagacactttgatccacctgatggccaaggcaggcctgaccctgcagcagcagcaccagcggctggcccagctcctcctcatcctctcccacatcaggcacatgagtaacaaaggcatggagcatctgtacagcatgaagtgcaagaacgtggtgcccctctatgacctgctgctggaggcggcggacgcccaccgcctacatgcgcccactagccgtggaggggcatccgtggaggagacggaccaaagccacttggccactgcgggctctacttcatcgcattccttgcaaaagtattacatcacgggggaggcagagggtttccctgccacagcttctagaggcagtggagagggcagaggaagtctgctaacatgcggtgacgtcgaggagaatcctggcccaatgaacctgagcaaaaacgtgagcgtgagcgtgtatatgaaggggaacgtcaacaatcatgagtttgagtacgacggggaaggtggtggtgatccttatacaggtaaatattccatgaagatgacgctacgtggtcaaaattccctacccttttcctatgatatcattaccacggcatttcagtatggtttccgcgtatttacaaaataccctgagggaattgttgactattttaaggactcgcttcccgacgcattccagtggaacagacgaattgtgtttgaagatggtggagtactaaacatgagcagtgatatcacatataaagataatgttctgcatggtgacgtcaaggctgagggagtgaacttcccgccgaatgggccagtgatgaagaatgaaattgtgatggaggaaccgactgaagaaacatttactccaaaaaacggggttcttgttggcttttgtcccaaagcgtacttacttaaagacggttcctattactatggaaatatgacaacattttacagatccaagaaatctggccaggcacctcctgggtatcactttgttaagcatcgtctcgtcaagaccaatgtgggacatggatttaagacggttgagcagactgaatatgccactgctcatgtcagtgatcttcccaagttcgaagcttga

SEQ ID NO: 62 - DNA, 6879 bp, Artificial sequence
  cloned, variant sequence 18
atgggcaagcccatccctaaccccctgttggggctggacagcaccgctcccaaaaagaaaaggaaggtgggcattcacggcgtgcctgcggccaccggtgctggagacatgagagctgccaacctttggccaagcccgctcatgatcaaacgctctaagaagaacagcctggccttgtccctgacggccgaccagatggtcagtgccttgttggatgctgagccccccatactctattccgagtatgatcctaccagacccttcagtgaagcttcgatgatgggcttactgaccaacctggcagacagggagctggttcacatgatcaactgggcgaagagggtgccaggctttgtggatttgaccctccatgatcaggtccaccttcttgaatgtgcctggctagagatcctgatgattggtctcgtctggcgctccatggagcacccagtgaagctactgtttgctcctaacttgctcttggacaggaaccagggaaaatgtgtagagggcatggtggagatcttcgacatgctgctggctacatcatctcggttccgcatgatgaatctgcagggagaggagtttgtgtgcctcaaatctattattttgcttaattctggagtgtacacatttctgtccagcaccctgaagtctctggaagagaaggaccatatccaccgagtcctggacaagatcacagacactttgatccacctgatggccaaggcaggcctgaccctgcagcagcagcaccagcggctggcccagctcctcctcatcctctcccacatcaggcacatgagtaacaaaggcatggagcatctgtacagcatgaagtgcaagaacgtggtgcccctctatgacctgctgctggaggcggcggacgcccaccgcctacatgcgcccactagccgtggaggggcatccgtggaggagacggaccaaagccacttggccactgcgggctctacttcatcgcattccttgcaaaagtattacatcacgggggaggcagagggtttccctgccacagctggcgccgacaaaaagtacagcatcggccttgatatcggcaccaatagcgtgggctgggccgttatcacagacgaatacaaggtacccagcaagaagttcaaggtgctggggaatacagacaggcactctatcaagaaaaaccttatcggggctctgctgtttgactcaggcgagaccgccgaggccaccaggttgaagaggaccgcaaggcgaaggtacacccggaggaagaacaggatctgctatctgcaggagatcttcagcaacgagatggccaaggtggacgacagcttcttccacaggctggaggagagcttccttgtcgaggaggataagaagcacgaacgacaccccatcttcggcaacatagtcgacgaggtcgcttatcacgagaagtaccccaccatctaccacctgcgaaagaaattggtggatagcaccgataaagccgacttgcgacttatctacttggctctggcgcacatgattaagttcaggggccacttcctgatcgagggcgaccttaaccccgacaacagtgacgtagacaaattgttcatccagcttgtacagacctataaccagctgttcgaggaaaaccctattaacgccagcggggtggatgcgaaggccatacttagcgccaggctgagcaaaagcaggcgcttggagaacctgatagcccagctgcccggtgaaaagaagaacggcctcttcggtaatctgattgccctgagcctgggcctgacccccaacttcaagagcaacttcgacctggcagaagatgccaagctgcagttgagtaaggacacctatgacgacgacttggacaatctgctcgcccaaatcggcgaccagtacgctgacctgttcctcgccgccaagaacctttctgacgcaatcctgcttagcgatatccttagggtgaacacagagatcaccaaggcccccctgagcgccagcatgatcaagaggtacgacgagcaccatcaggacctgacccttctgaaggccctggtgaggcagcaactgcccgagaagtacaaggagatctttttcgaccagagcaagaacggctacgccggctacatcgacggcggagccagccaagaggagttctacaagttcatcaagcccatcctggagaagatggatggcaccgaggagctgctggtgaagctgaacagggaagatttgctccggaagcagaggacctttgacaacggtagcatcccccaccagatccacctgggcgagctgcacgcaatactgaggcgacaggaggatttctaccccttcctcaaggacaatagggagaaaatcgaaaagattctgaccttcaggatcccctactacgtgggccctcttgccaggggcaacagccgattcgcttggatgacaagaaagagcgaggagaccatcaccccctggaacttcgaggaagtggtggacaaaggagcaagcgcgcagtctttcatcgaacggatgaccaatttcgacaaaaacctgcctaacgagaaggtgctgcccaagcacagcctgctttacgagtacttcaccgtgtacaacgagctcaccaaggtgaaatatgtgaccgagggcatgcgaaaacccgctttcctgagcggcgagcagaagaaggccatcgtggacctgctgttcaagaccaacaggaaggtgaccgtgaagcagctgaaggaggactacttcaagaagatcgagtgctttgatagcgtggaaataagcggcgtggaggacaggttcaacgccagcctgggcacctaccacgacttgttgaagataatcaaagacaaggatttcctggataatgaggagaacgaggatatactcgaggacatcgtgctgactttgaccctgtttgaggaccgagagatgattgaagaaaggctcaaaacctacgcccacctgttcgacgacaaagtgatgaaacaactgaagagacgaagatacaccggctggggcagactgtccaggaagctcatcaacggcattagggacaagcagagcggcaagaccatcctggatttcctgaagtccgacggcttcgccaaccgaaacttcatgcagctgattcacgatgacagcttgaccttcaaggaggacatccagaaggcccaggttagcggccagggcgactccctgcacgaacatattgcaaacctggcaggctcccctgcgatcaagaagggcatactgcagaccgttaaggttgtggacgaattggtcaaggtcatgggcaggcacaagcccgaaaacatagttatagagatggccagagagaaccagaccacccaaaagggccagaagaacagccgggagcgcatgaaaaggatcgaggagggtatcaaggaactcggaagccagatcctcaaagagcaccccgtggagaatacccagctccagaacgagaagctgtacctgtactacctgcagaacggcagggacatgtacgttgaccaggagttggacatcaacaggctttcagactatgacgtggatcacatagtgccccagagctttcttaaagacgatagcatcgacaacaaggtcctgacccgctccgacaaaaacaggggcaaaagcgacaacgtgccaagcgaagaggtggttaaaaagatgaagaactactggaggcaactgctcaacgcgaaattgatcacccagagaaagttcgataacctgaccaaggccgagaggggcggactctccgaacttgacaaagcgggcttcataaagaggcagctggtcgagacccgacagatcacgaagcacgtggcccaaatcctcgacagcagaatgaataccaagtacgatgagaatgacaaactcatcagggaagtgaaagtgattaccctgaagagcaagttggtgtccgactttcgcaaagatttccagttctacaaggtgagggagatcaacaactaccaccatgcccacgacgcatacctgaacgccgtggtcggcaccgccctgattaagaagtatccaaagctggagtccgaatttgtctacggcgactacaaagtttacgatgtgaggaagatgatcgctaagagcgaacaggagatcggcaaggccaccgctaagtatttcttctacagcaacatcatgaactttttcaagaccgagatcacacttgccaacggcgaaatcaggaagaggccgcttatcgagaccaacggtgagaccggcgagatcgtgtgggacaagggcagggacttcgccaccgtgaggaaagtcctgagcatgccccaggtgaatattgtgaaaaaaactgaggtgcagacaggcggctttagcaaggaatccatcctgcccaagaggaacagcgacaagctgatcgcccggaagaaggactgggaccctaagaagtatggaggcttcgacagccccaccgtagcctacagcgtgctggtggtcgcgaaggtagagaaggggaagagcaagaaactgaagagcgtgaaggagctgctcggcataaccatcatggagaggtccagctttgagaagaaccccattgactttttggaagccaagggctacaaagaggtcaaaaaggacctgatcatcaaactccccaagtactccctgtttgaattggagaacggcagaaagaggatgctggcgagcgctggggaactgcaaaagggcaacgaactggcgctgcccagcaagtacgtgaattttctgtacctggcgtcccactacgaaaagctgaaaggcagccccgaggacaacgagcagaagcagctgttcgtggagcagcacaagcattacctggacgagataatcgagcaaatcagcgagttcagcaagagggtgattctggccgacgcgaacctggataaggtcctcagcgcctacaacaagcaccgagacaaacccatcagggagcaggccgagaatatcatacacctgttcaccctgacaaatctgggcgcacctgcggcattcaaatacttcgataccaccatcgacaggaaaaggtacactagcactaaggaggtgctggatgccaccttgatccaccagtccattaccggcctgtatgagaccaggatcgacctgagccagcttggaggcgactctagggcggacccaaaaaagaaaaggaaggtgtccggatctgaattcgctggagacatgagagctgccaacctttggccaagcccgctcatgatcaaacgctctaagaagaacagcctggccttgtccctgacggccgaccagatggtcagtgccttgttggatgctgagccccccatactctattccgagtatgatcctaccagacccttcagtgaagcttcgatgatgggcttactgaccaacctggcagacagggagctggttcacatgatcaactgggcgaagagggtgccaggctttgtggatttgaccctccatgatcaggtccaccttcttgaatgtgcctggctagagatcctgatgattggtctcgtctggcgctccatggagcacccagtgaagctactgtttgctcctaacttgctcttggacaggaaccagggaaaatgtgtagagggcatggtggagatcttcgacatgctgctggctacatcatctcggttccgcatgatgaatctgcagggagaggagtttgtgtgcctcaaatctattattttgcttaattctggagtgtacacatttctgtccagcaccctgaagtctctggaagagaaggaccatatccaccgagtcctggacaagatcacagacactttgatccacctgatggccaaggcaggcctgaccctgcagcagcagcaccagcggctggcccagctcctcctcatcctctcccacatcaggcacatgagtaacaaaggcatggagcatctgtacagcatgaagtgcaagaacgtggtgcccctctatgacctgctgctggaggcggcggacgcccaccgcctacatgcgcccactagccgtggaggggcatccgtggaggagacggaccaaagccacttggccactgcgggctctacttcatcgcattccttgcaaaagtattacatcacgggggaggcagagggtttccctgccacagcttctagaggcagtggagagggcagaggaagtctgctaacatgcggtgacgtcgaggagaatcctggcccaatgaacctgagcaaaaacgtgagcgtgagcgtgtatatgaaggggaacgtcaacaatcatgagtttgagtacgacggggaaggtggtggtgatccttatacaggtaaatattccatgaagatgacgctacgtggtcaaaattccctacccttttcctatgatatcattaccacggcatttcagtatggtttccgcgtatttacaaaataccctgagggaattgttgactattttaaggactcgcttcccgacgcattccagtggaacagacgaattgtgtttgaagatggtggagtactaaacatgagcagtgatatcacatataaagataatgttctgcatggtgacgtcaaggctgagggagtgaacttcccgccgaatgggccagtgatgaagaatgaaattgtgatggaggaaccgactgaagaaacatttactccaaaaaacggggttcttgttggcttttgtcccaaagcgtacttacttaaagacggttcctattactatggaaatatgacaacattttacagatccaagaaatctggccaggcacctcctgggtatcactttgttaagcatcgtctcgtcaagaccaatgtgggacatggatttaagacggttgagcagactgaatatgccactgctcatgtcagtgatcttcccaagttcgaagcttga

SEQ ID NO: 63 - DNA, 6882 bp, Artificial sequence
  cloned, variant sequence 19
atgggcaagcccatccctaaccccctgttggggctggacagcaccgctcccaaaaagaaaaggaaggtgggcattcacggcgtgcctgcggccaccggtgctggagacatgagagctgccaacctttggccaagcccgctcatgatcaaacgctctaagaagaacagcctggccttgtccctgacggccgaccagatggtcagtgccttgttggatgctgagccccccatactctattccgagtatgatcctaccagacccttcagtgaagcttcgatgatgggcttactgaccaacctggcagacagggagctggttcacatgatcaactgggcgaagagggtgccaggctttgtggatttgaccctccatgatcaggtccaccttcttgaatgtgcctggctagagatcctgatgattggtctcgtctggcgctccatggagcacccagtgaagctactgtttgctcctaacttgctcttggacaggaaccagggaaaatgtgtagagggcatggtggagatcttcgacatgctgctggctacatcatctcggttccgcatgatgaatctgcagggagaggagtttgtgtgcctcaaatctattattttgcttaattctggagtgtacacatttctgtccagcaccctgaagtctctggaagagaaggaccatatccaccgagtcctggacaagatcacagacactttgatccacctgatggccaaggcaggcctgaccctgcagcagcagcaccagcggctggcccagctcctcctcatcctctcccacatcaggcacatgagtaacaaaggcatggagcatctgtacagcatgaagtgcaagaacgtggtgcccctctatgacctgctgctggaggcggcggacgcccaccgcctacatgcgcccactagccgtggaggggcatccgtggaggagacggaccaaagccacttggccactgcgggctctacttcatcgcattccttgcaaaagtattacatcacgggggaggcagagggtttccctgccacagctggcgccgacaaaaagtacagcatcggccttgatatcggcaccaatagcgtgggctgggccgttatcacagacgaatacaaggtacccagcaagaagttcaaggtgctggggaatacagacaggcactctatcaagaaaaaccttatcggggctctgctgtttgactcaggcgagaccgccgaggccaccaggttgaagaggaccgcaaggcgaaggtacacccggaggaagaacaggatctgctatctgcaggagatcttcagcaacgagatggccaaggtggacgacagcttcttccacaggctggaggagagcttccttgtcgaggaggataagaagcacgaacgacaccccatcttcggcaacatagtcgacgaggtcgcttatcacgagaagtaccccaccatctaccacctgcgaaagaaattggtggatagcaccgataaagccgacttgcgacttatctacttggctctggcgcacatgattaagttcaggggccacttcctgatcgagggcgaccttaaccccgacaacagtgacgtagacaaattgttcatccagcttgtacagacctataaccagctgttcgaggaaaaccctattaacgccagcggggtggatgcgaaggccatacttagcgccaggctgagcaaaagcaggcgcttggagaacctgatagcccagctgcccggtgaaaagaagaacggcctcttcggtaatctgattgccctgagcctgggcctgacccccaacttcaagagcaacttcgacctggcagaagatgccaagctgcagttgagtaaggacacctatgacgacgacttggacaatctgctcgcccaaatcggcgaccagtacgctgacctgttcctcgccgccaagaacctttctgacgcaatcctgcttagcgatatccttagggtgaacacagagatcaccaaggcccccctgagcgccagcatgatcaagaggtacgacgagcaccatcaggacctgacccttctgaaggccctggtgaggcagcaactgcccgagaagtacaaggagatctttttcgaccagagcaagaacggctacgccggctacatcgacggcggagccagccaagaggagttctacaagttcatcaagcccatcctggagaagatggatggcaccgaggagctgctggtgaagctgaacagggaagatttgctccggaagcagaggacctttgacaacggtagcatcccccaccagatccacctgggcgagctgcacgcaatactgaggcgacaggaggatttctaccccttcctcaaggacaatagggagaaaatcgaaaagattctgaccttcaggatcccctactacgtgggccctcttgccaggggcaacagccgattcgcttggatgacaagaaagagcgaggagaccatcaccccctggaacttcgaggaagtggtggacaaaggagcaagcgcgcagtctttcatcgaacggatgaccaatttcgacaaaaacctgcctaacgagaaggtgctgcccaagcacagcctgctttacgagtacttcaccgtgtacaacgagctcaccaaggtgaaatatgtgaccgagggcatgcgaaaacccgctttcctgagcggcgagcagaagaaggccatcgtggacctgctgttcaagaccaacaggaaggtgaccgtgaagcagctgaaggaggactacttcaagaagatcgagtgctttgatagcgtggaaataagcggcgtggaggacaggttcaacgccagcctgggcacctaccacgacttgttgaagataatcaaagacaaggatttcctggataatgaggagaacgaggatatactcgaggacatcgtgctgactttgaccctgtttgaggaccgagagatgattgaagaaaggctcaaaacctacgcccacctgttcgacgacaaagtgatgaaacaactgaagagacgaagatacaccggctggggcagactgtccaggaagctcatcaacggcattagggacaagcagagcggcaagaccatcctggatttcctgaagtccgacggcttcgccaaccgaaacttcatgcagctgattcacgatgacagcttgaccttcaaggaggacatccagaaggcccaggttagcggccagggcgactccctgcacgaacatattgcaaacctggcaggctcccctgcgatcaagaagggcatactgcagaccgttaaggttgtggacgaattggtcaaggtcatgggcaggcacaagcccgaaaacatagttatagagatggccagagagaaccagaccacccaaaagggccagaagaacagccgggagcgcatgaaaaggatcgaggagggtatcaaggaactcggaagccagatcctcaaagagcaccccgtggagaatacccagctccagaacgagaagctgtacctgtactacctgcagaacggcagggacatgtacgttgaccaggagttggacatcaacaggctttcagactatgacgtggatcacatagtgccccagagctttcttaaagacgatagcatcgacaacaaggtcctgacccgctccgacaaaaacaggggcaaaagcgacaacgtgccaagcgaagaggtggttaaaaagatgaagaactactggaggcaactgctcaacgcgaaattgatcacccagagaaagttcgataacctgaccaaggccgagaggggcggactctccgaacttgacaaagcgggcttcataaagaggcagctggtcgagacccgacagatcacgaagcacgtggcccaaatcctcgacagcagaatgaataccaagtacgatgagaatgacaaactcatcagggaagtgaaagtgattaccctgaagagcaagttggtgtccgactttcgcaaagatttccagttctacaaggtgagggagatcaacaactaccaccatgcccacgacgcatacctgaacgccgtggtcggcaccgccctgattaagaagtatccaaagctggagtccgaatttgtctacggcgactacaaagtttacgatgtgaggaagatgatcgctaagagcgaacaggagatcggcaaggccaccgctaagtatttcttctacagcaacatcatgaactttttcaagaccgagatcacacttgccaacggcgaaatcaggaagaggccgcttatcgagaccaacggtgagaccggcgagatcgtgtgggacaagggcagggacttcgccaccgtgaggaaagtcctgagcatgccccaggtgaatattgtgaaaaaaactgaggtgcagacaggcggctttagcaaggaatccatcctgcccaagaggaacagcgacaagctgatcgcccggaagaaggactgggaccctaagaagtatggaggcttcgacagccccaccgtagcctacagcgtgctggtggtcgcgaaggtagagaaggggaagagcaagaaactgaagagcgtgaaggagctgctcggcataaccatcatggagaggtccagctttgagaagaaccccattgactttttggaagccaagggctacaaagaggtcaaaaaggacctgatcatcaaactccccaagtactccctgtttgaattggagaacggcagaaagaggatgctggcgagcgctggggaactgcaaaagggcaacgaactggcgctgcccagcaagtacgtgaattttctgtacctggcgtcccactacgaaaagctgaaaggcagccccgaggacaacgagcagaagcagctgttcgtggagcagcacaagcattacctggacgagataatcgagcaaatcagcgagttcagcaagagggtgattctggccgacgcgaacctggataaggtcctcagcgcctacaacaagcaccgagacaaacccatcagggagcaggccgagaatatcatacacctgttcaccctgacaaatctgggcgcacctgcggcattcaaatacttcgataccaccatcgacaggaaaaggtacactagcactaaggaggtgctggatgccaccttgatccaccagtccattaccggcctgtatgagaccaggatcgacctgagccagcttggaggcgactctagggcggacccaaaaaagaaaaggaaggtggaattcggcggtggatccgctggagacatgagagctgccaacctttggccaagcccgctcatgatcaaacgctctaagaagaacagcctggccttgtccctgacggccgaccagatggtcagtgccttgttggatgctgagccccccatactctattccgagtatgatcctaccagacccttcagtgaagcttcgatgatgggcttactgaccaacctggcagacagggagctggttcacatgatcaactgggcgaagagggtgccaggctttgtggatttgaccctccatgatcaggtccaccttcttgaatgtgcctggctagagatcctgatgattggtctcgtctggcgctccatggagcacccagtgaagctactgtttgctcctaacttgctcttggacaggaaccagggaaaatgtgtagagggcatggtggagatcttcgacatgctgctggctacatcatctcggttccgcatgatgaatctgcagggagaggagtttgtgtgcctcaaatctattattttgcttaattctggagtgtacacatttctgtccagcaccctgaagtctctggaagagaaggaccatatccaccgagtcctggacaagatcacagacactttgatccacctgatggccaaggcaggcctgaccctgcagcagcagcaccagcggctggcccagctcctcctcatcctctcccacatcaggcacatgagtaacaaaggcatggagcatctgtacagcatgaagtgcaagaacgtggtgcccctctatgacctgctgctggaggcggcggacgcccaccgcctacatgcgcccactagccgtggaggggcatccgtggaggagacggaccaaagccacttggccactgcgggctctacttcatcgcattccttgcaaaagtattacatcacgggggaggcagagggtttccctgccacagcttctagaggcagtggagagggcagaggaagtctgctaacatgcggtgacgtcgaggagaatcctggcccaatgaacctgagcaaaaacgtgagcgtgagcgtgtatatgaaggggaacgtcaacaatcatgagtttgagtacgacggggaaggtggtggtgatccttatacaggtaaatattccatgaagatgacgctacgtggtcaaaattccctacccttttcctatgatatcattaccacggcatttcagtatggtttccgcgtatttacaaaataccctgagggaattgttgactattttaaggactcgcttcccgacgcattccagtggaacagacgaattgtgtttgaagatggtggagtactaaacatgagcagtgatatcacatataaagataatgttctgcatggtgacgtcaaggctgagggagtgaacttcccgccgaatgggccagtgatgaagaatgaaattgtgatggaggaaccgactgaagaaacatttactccaaaaaacggggttcttgttggcttttgtcccaaagcgtacttacttaaagacggttcctattactatggaaatatgacaacattttacagatccaagaaatctggccaggcacctcctgggtatcactttgttaagcatcgtctcgtcaagaccaatgtgggacatggatttaagacggttgagcagactgaatatgccactgctcatgtcagtgatcttcccaagttcgaagcttga

SEQ ID NO: 64 - DNA, 7845 bp, Artificial sequence
  cloned, variant sequence 20
atgggcaagcccatccctaaccccctgttggggctggacagcaccgctcccaaaaagaaaaggaaggtgggcattcacggcgtgcctgcggccaccggtgctggagacatgagagctgccaacctttggccaagcccgctcatgatcaaacgctctaagaagaacagcctggccttgtccctgacggccgaccagatggtcagtgccttgttggatgctgagccccccatactctattccgagtatgatcctaccagacccttcagtgaagcttcgatgatgggcttactgaccaacctggcagacagggagctggttcacatgatcaactgggcgaagagggtgccaggctttgtggatttgaccctccatgatcaggtccaccttcttgaatgtgcctggctagagatcctgatgattggtctcgtctggcgctccatggagcacccagtgaagctactgtttgctcctaacttgctcttggacaggaaccagggaaaatgtgtagagggcatggtggagatcttcgacatgctgctggctacatcatctcggttccgcatgatgaatctgcagggagaggagtttgtgtgcctcaaatctattattttgcttaattctggagtgtacacatttctgtccagcaccctgaagtctctggaagagaaggaccatatccaccgagtcctggacaagatcacagacactttgatccacctgatggccaaggcaggcctgaccctgcagcagcagcaccagcggctggcccagctcctcctcatcctctcccacatcaggcacatgagtaacaaaggcatggagcatctgtacagcatgaagtgcaagaacgtggtgcccctctatgacctgctgctggaggcggcggacgcccaccgcctacatgcgcccactagccgtggaggggcatccgtggaggagacggaccaaagccacttggccactgcgggctctacttcatcgcattccttgcaaaagtattacatcacgggggaggcagagggtttccctgccacagctggtggaagtcctaggggaggctctgctggagacatgagagctgccaacctttggccaagcccgctcatgatcaaacgctctaagaagaacagcctggccttgtccctgacggccgaccagatggtcagtgccttgttggatgctgagccccccatactctattccgagtatgatcctaccagacccttcagtgaagcttcgatgatgggcttactgaccaacctggcagacagggagctggttcacatgatcaactgggcgaagagggtgccaggctttgtggatttgaccctccatgatcaggtccaccttcttgaatgtgcctggctagagatcctgatgattggtctcgtctggcgctccatggagcacccagtgaagctactgtttgctcctaacttgctcttggacaggaaccagggaaaatgtgtagagggcatggtggagatcttcgacatgctgctggctacatcatctcggttccgcatgatgaatctgcagggagaggagtttgtgtgcctcaaatctattattttgcttaattctggagtgtacacatttctgtccagcaccctgaagtctctggaagagaaggaccatatccaccgagtcctggacaagatcacagacactttgatccacctgatggccaaggcaggcctgaccctgcagcagcagcaccagcggctggcccagctcctcctcatcctctcccacatcaggcacatgagtaacaaaggcatggagcatctgtacagcatgaagtgcaagaacgtggtgcccctctatgacctgctgctggaggcggcggacgcccaccgcctacatgcgcccactagccgtggaggggcatccgtggaggagacggaccaaagccacttggccactgcgggctctacttcatcgcattccttgcaaaagtattacatcacgggggaggcagagggtttccctgccacagctacaccagaatcgggcgccgacaaaaagtacagcatcggccttgatatcggcaccaatagcgtgggctgggccgttatcacagacgaatacaaggtacccagcaagaagttcaaggtgctggggaatacagacaggcactctatcaagaaaaaccttatcggggctctgctgtttgactcaggcgagaccgccgaggccaccaggttgaagaggaccgcaaggcgaaggtacacccggaggaagaacaggatctgctatctgcaggagatcttcagcaacgagatggccaaggtggacgacagcttcttccacaggctggaggagagcttccttgtcgaggaggataagaagcacgaacgacaccccatcttcggcaacatagtcgacgaggtcgcttatcacgagaagtaccccaccatctaccacctgcgaaagaaattggtggatagcaccgataaagccgacttgcgacttatctacttggctctggcgcacatgattaagttcaggggccacttcctgatcgagggcgaccttaaccccgacaacagtgacgtagacaaattgttcatccagcttgtacagacctataaccagctgttcgaggaaaaccctattaacgccagcggggtggatgcgaaggccatacttagcgccaggctgagcaaaagcaggcgcttggagaacctgatagcccagctgcccggtgaaaagaagaacggcctcttcggtaatctgattgccctgagcctgggcctgacccccaacttcaagagcaacttcgacctggcagaagatgccaagctgcagttgagtaaggacacctatgacgacgacttggacaatctgctcgcccaaatcggcgaccagtacgctgacctgttcctcgccgccaagaacctttctgacgcaatcctgcttagcgatatccttagggtgaacacagagatcaccaaggcccccctgagcgccagcatgatcaagaggtacgacgagcaccatcaggacctgacccttctgaaggccctggtgaggcagcaactgcccgagaagtacaaggagatctttttcgaccagagcaagaacggctacgccggctacatcgacggcggagccagccaagaggagttctacaagttcatcaagcccatcctggagaagatggatggcaccgaggagctgctggtgaagctgaacagggaagatttgctccggaagcagaggacctttgacaacggtagcatcccccaccagatccacctgggcgagctgcacgcaatactgaggcgacaggaggatttctaccccttcctcaaggacaatagggagaaaatcgaaaagattctgaccttcaggatcccctactacgtgggccctcttgccaggggcaacagccgattcgcttggatgacaagaaagagcgaggagaccatcaccccctggaacttcgaggaagtggtggacaaaggagcaagcgcgcagtctttcatcgaacggatgaccaatttcgacaaaaacctgcctaacgagaaggtgctgcccaagcacagcctgctttacgagtacttcaccgtgtacaacgagctcaccaaggtgaaatatgtgaccgagggcatgcgaaaacccgctttcctgagcggcgagcagaagaaggccatcgtggacctgctgttcaagaccaacaggaaggtgaccgtgaagcagctgaaggaggactacttcaagaagatcgagtgctttgatagcgtggaaataagcggcgtggaggacaggttcaacgccagcctgggcacctaccacgacttgttgaagataatcaaagacaaggatttcctggataatgaggagaacgaggatatactcgaggacatcgtgctgactttgaccctgtttgaggaccgagagatgattgaagaaaggctcaaaacctacgcccacctgttcgacgacaaagtgatgaaacaactgaagagacgaagatacaccggctggggcagactgtccaggaagctcatcaacggcattagggacaagcagagcggcaagaccatcctggatttcctgaagtccgacggcttcgccaaccgaaacttcatgcagctgattcacgatgacagcttgaccttcaaggaggacatccagaaggcccaggttagcggccagggcgactccctgcacgaacatattgcaaacctggcaggctcccctgcgatcaagaagggcatactgcagaccgttaaggttgtggacgaattggtcaaggtcatgggcaggcacaagcccgaaaacatagttatagagatggccagagagaaccagaccacccaaaagggccagaagaacagccgggagcgcatgaaaaggatcgaggagggtatcaaggaactcggaagccagatcctcaaagagcaccccgtggagaatacccagctccagaacgagaagctgtacctgtactacctgcagaacggcagggacatgtacgttgaccaggagttggacatcaacaggctttcagactatgacgtggatcacatagtgccccagagctttcttaaagacgatagcatcgacaacaaggtcctgacccgctccgacaaaaacaggggcaaaagcgacaacgtgccaagcgaagaggtggttaaaaagatgaagaactactggaggcaactgctcaacgcgaaattgatcacccagagaaagttcgataacctgaccaaggccgagaggggcggactctccgaacttgacaaagcgggcttcataaagaggcagctggtcgagacccgacagatcacgaagcacgtggcccaaatcctcgacagcagaatgaataccaagtacgatgagaatgacaaactcatcagggaagtgaaagtgattaccctgaagagcaagttggtgtccgactttcgcaaagatttccagttctacaaggtgagggagatcaacaactaccaccatgcccacgacgcatacctgaacgccgtggtcggcaccgccctgattaagaagtatccaaagctggagtccgaatttgtctacggcgactacaaagtttacgatgtgaggaagatgatcgctaagagcgaacaggagatcggcaaggccaccgctaagtatttcttctacagcaacatcatgaactttttcaagaccgagatcacacttgccaacggcgaaatcaggaagaggccgcttatcgagaccaacggtgagaccggcgagatcgtgtgggacaagggcagggacttcgccaccgtgaggaaagtcctgagcatgccccaggtgaatattgtgaaaaaaactgaggtgcagacaggcggctttagcaaggaatccatcctgcccaagaggaacagcgacaagctgatcgcccggaagaaggactgggaccctaagaagtatggaggcttcgacagccccaccgtagcctacagcgtgctggtggtcgcgaaggtagagaaggggaagagcaagaaactgaagagcgtgaaggagctgctcggcataaccatcatggagaggtccagctttgagaagaaccccattgactttttggaagccaagggctacaaagaggtcaaaaaggacctgatcatcaaactccccaagtactccctgtttgaattggagaacggcagaaagaggatgctggcgagcgctggggaactgcaaaagggcaacgaactggcgctgcccagcaagtacgtgaattttctgtacctggcgtcccactacgaaaagctgaaaggcagccccgaggacaacgagcagaagcagctgttcgtggagcagcacaagcattacctggacgagataatcgagcaaatcagcgagttcagcaagagggtgattctggccgacgcgaacctggataaggtcctcagcgcctacaacaagcaccgagacaaacccatcagggagcaggccgagaatatcatacacctgttcaccctgacaaatctgggcgcacctgcggcattcaaatacttcgataccaccatcgacaggaaaaggtacactagcactaaggaggtgctggatgccaccttgatccaccagtccattaccggcctgtatgagaccaggatcgacctgagccagcttggaggcgactctagggcggacccaaaaaagaaaaggaaggtggaattcgctggagacatgagagctgccaacctttggccaagcccgctcatgatcaaacgctctaagaagaacagcctggccttgtccctgacggccgaccagatggtcagtgccttgttggatgctgagccccccatactctattccgagtatgatcctaccagacccttcagtgaagcttcgatgatgggcttactgaccaacctggcagacagggagctggttcacatgatcaactgggcgaagagggtgccaggctttgtggatttgaccctccatgatcaggtccaccttcttgaatgtgcctggctagagatcctgatgattggtctcgtctggcgctccatggagcacccagtgaagctactgtttgctcctaacttgctcttggacaggaaccagggaaaatgtgtagagggcatggtggagatcttcgacatgctgctggctacatcatctcggttccgcatgatgaatctgcagggagaggagtttgtgtgcctcaaatctattattttgcttaattctggagtgtacacatttctgtccagcaccctgaagtctctggaagagaaggaccatatccaccgagtcctggacaagatcacagacactttgatccacctgatggccaaggcaggcctgaccctgcagcagcagcaccagcggctggcccagctcctcctcatcctctcccacatcaggcacatgagtaacaaaggcatggagcatctgtacagcatgaagtgcaagaacgtggtgcccctctatgacctgctgctggaggcggcggacgcccaccgcctacatgcgcccactagccgtggaggggcatccgtggaggagacggaccaaagccacttggccactgcgggctctacttcatcgcattccttgcaaaagtattacatcacgggggaggcagagggtttccctgccacagcttctagaggcagtggagagggcagaggaagtctgctaacatgcggtgacgtcgaggagaatcctggcccaatgaacctgagcaaaaacgtgagcgtgagcgtgtatatgaaggggaacgtcaacaatcatgagtttgagtacgacggggaaggtggtggtgatccttatacaggtaaatattccatgaagatgacgctacgtggtcaaaattccctacccttttcctatgatatcattaccacggcatttcagtatggtttccgcgtatttacaaaataccctgagggaattgttgactattttaaggactcgcttcccgacgcattccagtggaacagacgaattgtgtttgaagatggtggagtactaaacatgagcagtgatatcacatataaagataatgttctgcatggtgacgtcaaggctgagggagtgaacttcccgccgaatgggccagtgatgaagaatgaaattgtgatggaggaaccgactgaagaaacatttactccaaaaaacggggttcttgttggcttttgtcccaaagcgtacttacttaaagacggttcctattactatggaaatatgacaacattttacagatccaagaaatctggccaggcacctcctgggtatcactttgttaagcatcgtctcgtcaagaccaatgtgggacatggatttaagacggttgagcagactgaatatgccactgctcatgtcagtgatcttcccaagttcgaagcttga

SEQ ID NO: 65 - DNA, 7854 bp, Artificial sequence
  cloned, variant sequence 21
atgggcaagcccatccctaaccccctgttggggctggacagcaccgctcccaaaaagaaaaggaaggtgggcattcacggcgtgcctgcggccaccggtggaggctctgctggagacatgagagctgccaacctttggccaagcccgctcatgatcaaacgctctaagaagaacagcctggccttgtccctgacggccgaccagatggtcagtgccttgttggatgctgagccccccatactctattccgagtatgatcctaccagacccttcagtgaagcttcgatgatgggcttactgaccaacctggcagacagggagctggttcacatgatcaactgggcgaagagggtgccaggctttgtggatttgaccctccatgatcaggtccaccttcttgaatgtgcctggctagagatcctgatgattggtctcgtctggcgctccatggagcacccagtgaagctactgtttgctcctaacttgctcttggacaggaaccagggaaaatgtgtagagggcatggtggagatcttcgacatgctgctggctacatcatctcggttccgcatgatgaatctgcagggagaggagtttgtgtgcctcaaatctattattttgcttaattctggagtgtacacatttctgtccagcaccctgaagtctctggaagagaaggaccatatccaccgagtcctggacaagatcacagacactttgatccacctgatggccaaggcaggcctgaccctgcagcagcagcaccagcggctggcccagctcctcctcatcctctcccacatcaggcacatgagtaacaaaggcatggagcatctgtacagcatgaagtgcaagaacgtggtgcccctctatgacctgctgctggaggcggcggacgcccaccgcctacatgcgcccactagccgtggaggggcatccgtggaggagacggaccaaagccacttggccactgcgggctctacttcatcgcattccttgcaaaagtattacatcacgggggaggcagagggtttccctgccacagctggtggaagtcctaggggaggctctgctggagacatgagagctgccaacctttggccaagcccgctcatgatcaaacgctctaagaagaacagcctggccttgtccctgacggccgaccagatggtcagtgccttgttggatgctgagccccccatactctattccgagtatgatcctaccagacccttcagtgaagcttcgatgatgggcttactgaccaacctggcagacagggagctggttcacatgatcaactgggcgaagagggtgccaggctttgtggatttgaccctccatgatcaggtccaccttcttgaatgtgcctggctagagatcctgatgattggtctcgtctggcgctccatggagcacccagtgaagctactgtttgctcctaacttgctcttggacaggaaccagggaaaatgtgtagagggcatggtggagatcttcgacatgctgctggctacatcatctcggttccgcatgatgaatctgcagggagaggagtttgtgtgcctcaaatctattattttgcttaattctggagtgtacacatttctgtccagcaccctgaagtctctggaagagaaggaccatatccaccgagtcctggacaagatcacagacactttgatccacctgatggccaaggcaggcctgaccctgcagcagcagcaccagcggctggcccagctcctcctcatcctctcccacatcaggcacatgagtaacaaaggcatggagcatctgtacagcatgaagtgcaagaacgtggtgcccctctatgacctgctgctggaggcggcggacgcccaccgcctacatgcgcccactagccgtggaggggcatccgtggaggagacggaccaaagccacttggccactgcgggctctacttcatcgcattccttgcaaaagtattacatcacgggggaggcagagggtttccctgccacagctacaccagaatcgggcgccgacaaaaagtacagcatcggccttgatatcggcaccaatagcgtgggctgggccgttatcacagacgaatacaaggtacccagcaagaagttcaaggtgctggggaatacagacaggcactctatcaagaaaaaccttatcggggctctgctgtttgactcaggcgagaccgccgaggccaccaggttgaagaggaccgcaaggcgaaggtacacccggaggaagaacaggatctgctatctgcaggagatcttcagcaacgagatggccaaggtggacgacagcttcttccacaggctggaggagagcttccttgtcgaggaggataagaagcacgaacgacaccccatcttcggcaacatagtcgacgaggtcgcttatcacgagaagtaccccaccatctaccacctgcgaaagaaattggtggatagcaccgataaagccgacttgcgacttatctacttggctctggcgcacatgattaagttcaggggccacttcctgatcgagggcgaccttaaccccgacaacagtgacgtagacaaattgttcatccagcttgtacagacctataaccagctgttcgaggaaaaccctattaacgccagcggggtggatgcgaaggccatacttagcgccaggctgagcaaaagcaggcgcttggagaacctgatagcccagctgcccggtgaaaagaagaacggcctcttcggtaatctgattgccctgagcctgggcctgacccccaacttcaagagcaacttcgacctggcagaagatgccaagctgcagttgagtaaggacacctatgacgacgacttggacaatctgctcgcccaaatcggcgaccagtacgctgacctgttcctcgccgccaagaacctttctgacgcaatcctgcttagcgatatccttagggtgaacacagagatcaccaaggcccccctgagcgccagcatgatcaagaggtacgacgagcaccatcaggacctgacccttctgaaggccctggtgaggcagcaactgcccgagaagtacaaggagatctttttcgaccagagcaagaacggctacgccggctacatcgacggcggagccagccaagaggagttctacaagttcatcaagcccatcctggagaagatggatggcaccgaggagctgctggtgaagctgaacagggaagatttgctccggaagcagaggacctttgacaacggtagcatcccccaccagatccacctgggcgagctgcacgcaatactgaggcgacaggaggatttctaccccttcctcaaggacaatagggagaaaatcgaaaagattctgaccttcaggatcccctactacgtgggccctcttgccaggggcaacagccgattcgcttggatgacaagaaagagcgaggagaccatcaccccctggaacttcgaggaagtggtggacaaaggagcaagcgcgcagtctttcatcgaacggatgaccaatttcgacaaaaacctgcctaacgagaaggtgctgcccaagcacagcctgctttacgagtacttcaccgtgtacaacgagctcaccaaggtgaaatatgtgaccgagggcatgcgaaaacccgctttcctgagcggcgagcagaagaaggccatcgtggacctgctgttcaagaccaacaggaaggtgaccgtgaagcagctgaaggaggactacttcaagaagatcgagtgctttgatagcgtggaaataagcggcgtggaggacaggttcaacgccagcctgggcacctaccacgacttgttgaagataatcaaagacaaggatttcctggataatgaggagaacgaggatatactcgaggacatcgtgctgactttgaccctgtttgaggaccgagagatgattgaagaaaggctcaaaacctacgcccacctgttcgacgacaaagtgatgaaacaactgaagagacgaagatacaccggctggggcagactgtccaggaagctcatcaacggcattagggacaagcagagcggcaagaccatcctggatttcctgaagtccgacggcttcgccaaccgaaacttcatgcagctgattcacgatgacagcttgaccttcaaggaggacatccagaaggcccaggttagcggccagggcgactccctgcacgaacatattgcaaacctggcaggctcccctgcgatcaagaagggcatactgcagaccgttaaggttgtggacgaattggtcaaggtcatgggcaggcacaagcccgaaaacatagttatagagatggccagagagaaccagaccacccaaaagggccagaagaacagccgggagcgcatgaaaaggatcgaggagggtatcaaggaactcggaagccagatcctcaaagagcaccccgtggagaatacccagctccagaacgagaagctgtacctgtactacctgcagaacggcagggacatgtacgttgaccaggagttggacatcaacaggctttcagactatgacgtggatcacatagtgccccagagctttcttaaagacgatagcatcgacaacaaggtcctgacccgctccgacaaaaacaggggcaaaagcgacaacgtgccaagcgaagaggtggttaaaaagatgaagaactactggaggcaactgctcaacgcgaaattgatcacccagagaaagttcgataacctgaccaaggccgagaggggcggactctccgaacttgacaaagcgggcttcataaagaggcagctggtcgagacccgacagatcacgaagcacgtggcccaaatcctcgacagcagaatgaataccaagtacgatgagaatgacaaactcatcagggaagtgaaagtgattaccctgaagagcaagttggtgtccgactttcgcaaagatttccagttctacaaggtgagggagatcaacaactaccaccatgcccacgacgcatacctgaacgccgtggtcggcaccgccctgattaagaagtatccaaagctggagtccgaatttgtctacggcgactacaaagtttacgatgtgaggaagatgatcgctaagagcgaacaggagatcggcaaggccaccgctaagtatttcttctacagcaacatcatgaactttttcaagaccgagatcacacttgccaacggcgaaatcaggaagaggccgcttatcgagaccaacggtgagaccggcgagatcgtgtgggacaagggcagggacttcgccaccgtgaggaaagtcctgagcatgccccaggtgaatattgtgaaaaaaactgaggtgcagacaggcggctttagcaaggaatccatcctgcccaagaggaacagcgacaagctgatcgcccggaagaaggactgggaccctaagaagtatggaggcttcgacagccccaccgtagcctacagcgtgctggtggtcgcgaaggtagagaaggggaagagcaagaaactgaagagcgtgaaggagctgctcggcataaccatcatggagaggtccagctttgagaagaaccccattgactttttggaagccaagggctacaaagaggtcaaaaaggacctgatcatcaaactccccaagtactccctgtttgaattggagaacggcagaaagaggatgctggcgagcgctggggaactgcaaaagggcaacgaactggcgctgcccagcaagtacgtgaattttctgtacctggcgtcccactacgaaaagctgaaaggcagccccgaggacaacgagcagaagcagctgttcgtggagcagcacaagcattacctggacgagataatcgagcaaatcagcgagttcagcaagagggtgattctggccgacgcgaacctggataaggtcctcagcgcctacaacaagcaccgagacaaacccatcagggagcaggccgagaatatcatacacctgttcaccctgacaaatctgggcgcacctgcggcattcaaatacttcgataccaccatcgacaggaaaaggtacactagcactaaggaggtgctggatgccaccttgatccaccagtccattaccggcctgtatgagaccaggatcgacctgagccagcttggaggcgactctagggcggacccaaaaaagaaaaggaaggtggaattcgctggagacatgagagctgccaacctttggccaagcccgctcatgatcaaacgctctaagaagaacagcctggccttgtccctgacggccgaccagatggtcagtgccttgttggatgctgagccccccatactctattccgagtatgatcctaccagacccttcagtgaagcttcgatgatgggcttactgaccaacctggcagacagggagctggttcacatgatcaactgggcgaagagggtgccaggctttgtggatttgaccctccatgatcaggtccaccttcttgaatgtgcctggctagagatcctgatgattggtctcgtctggcgctccatggagcacccagtgaagctactgtttgctcctaacttgctcttggacaggaaccagggaaaatgtgtagagggcatggtggagatcttcgacatgctgctggctacatcatctcggttccgcatgatgaatctgcagggagaggagtttgtgtgcctcaaatctattattttgcttaattctggagtgtacacatttctgtccagcaccctgaagtctctggaagagaaggaccatatccaccgagtcctggacaagatcacagacactttgatccacctgatggccaaggcaggcctgaccctgcagcagcagcaccagcggctggcccagctcctcctcatcctctcccacatcaggcacatgagtaacaaaggcatggagcatctgtacagcatgaagtgcaagaacgtggtgcccctctatgacctgctgctggaggcggcggacgcccaccgcctacatgcgcccactagccgtggaggggcatccgtggaggagacggaccaaagccacttggccactgcgggctctacttcatcgcattccttgcaaaagtattacatcacgggggaggcagagggtttccctgccacagcttctagaggcagtggagagggcagaggaagtctgctaacatgcggtgacgtcgaggagaatcctggcccaatgaacctgagcaaaaacgtgagcgtgagcgtgtatatgaaggggaacgtcaacaatcatgagtttgagtacgacggggaaggtggtggtgatccttatacaggtaaatattccatgaagatgacgctacgtggtcaaaattccctacccttttcctatgatatcattaccacggcatttcagtatggtttccgcgtatttacaaaataccctgagggaattgttgactattttaaggactcgcttcccgacgcattccagtggaacagacgaattgtgtttgaagatggtggagtactaaacatgagcagtgatatcacatataaagataatgttctgcatggtgacgtcaaggctgagggagtgaacttcccgccgaatgggccagtgatgaagaatgaaattgtgatggaggaaccgactgaagaaacatttactccaaaaaacggggttcttgttggcttttgtcccaaagcgtacttacttaaagacggttcctattactatggaaatatgacaacattttacagatccaagaaatctggccaggcacctcctgggtatcactttgttaagcatcgtctcgtcaagaccaatgtgggacatggatttaagacggttgagcagactgaatatgccactgctcatgtcagtgatcttcccaagttcgaagcttga

SEQ ID NO: 66 - DNA, 7845 bp, Artificial sequence
  cloned, variant sequence 22
atgggcaagcccatccctaaccccctgttggggctggacagcaccgctcccaaaaagaaaaggaaggtgggcattcacggcgtgcctgcggccaccggtggaggctctgctggagacatgagagctgccaacctttggccaagcccgctcatgatcaaacgctctaagaagaacagcctggccttgtccctgacggccgaccagatggtcagtgccttgttggatgctgagccccccatactctattccgagtatgatcctaccagacccttcagtgaagcttcgatgatgggcttactgaccaacctggcagacagggagctggttcacatgatcaactgggcgaagagggtgccaggctttgtggatttgaccctccatgatcaggtccaccttcttgaatgtgcctggctagagatcctgatgattggtctcgtctggcgctccatggagcacccagtgaagctactgtttgctcctaacttgctcttggacaggaaccagggaaaatgtgtagagggcatggtggagatcttcgacatgctgctggctacatcatctcggttccgcatgatgaatctgcagggagaggagtttgtgtgcctcaaatctattattttgcttaattctggagtgtacacatttctgtccagcaccctgaagtctctggaagagaaggaccatatccaccgagtcctggacaagatcacagacactttgatccacctgatggccaaggcaggcctgaccctgcagcagcagcaccagcggctggcccagctcctcctcatcctctcccacatcaggcacatgagtaacaaaggcatggagcatctgtacagcatgaagtgcaagaacgtggtgcccctctatgacctgctgctggaggcggcggacgcccaccgcctacatgcgcccactagccgtggaggggcatccgtggaggagacggaccaaagccacttggccactgcgggctctacttcatcgcattccttgcaaaagtattacatcacgggggaggcagagggtttccctgccacagctcctaggggaggttctgctggagacatgagagctgccaacctttggccaagcccgctcatgatcaaacgctctaagaagaacagcctggccttgtccctgacggccgaccagatggtcagtgccttgttggatgctgagccccccatactctattccgagtatgatcctaccagacccttcagtgaagcttcgatgatgggcttactgaccaacctggcagacagggagctggttcacatgatcaactgggcgaagagggtgccaggctttgtggatttgaccctccatgatcaggtccaccttcttgaatgtgcctggctagagatcctgatgattggtctcgtctggcgctccatggagcacccagtgaagctactgtttgctcctaacttgctcttggacaggaaccagggaaaatgtgtagagggcatggtggagatcttcgacatgctgctggctacatcatctcggttccgcatgatgaatctgcagggagaggagtttgtgtgcctcaaatctattattttgcttaattctggagtgtacacatttctgtccagcaccctgaagtctctggaagagaaggaccatatccaccgagtcctggacaagatcacagacactttgatccacctgatggccaaggcaggcctgaccctgcagcagcagcaccagcggctggcccagctcctcctcatcctctcccacatcaggcacatgagtaacaaaggcatggagcatctgtacagcatgaagtgcaagaacgtggtgcccctctatgacctgctgctggaggcggcggacgcccaccgcctacatgcgcccactagccgtggaggggcatccgtggaggagacggaccaaagccacttggccactgcgggctctacttcatcgcattccttgcaaaagtattacatcacgggggaggcagagggtttccctgccacagctacaccagaatcgggcgccgacaaaaagtacagcatcggccttgatatcggcaccaatagcgtgggctgggccgttatcacagacgaatacaaggtacccagcaagaagttcaaggtgctggggaatacagacaggcactctatcaagaaaaaccttatcggggctctgctgtttgactcaggcgagaccgccgaggccaccaggttgaagaggaccgcaaggcgaaggtacacccggaggaagaacaggatctgctatctgcaggagatcttcagcaacgagatggccaaggtggacgacagcttcttccacaggctggaggagagcttccttgtcgaggaggataagaagcacgaacgacaccccatcttcggcaacatagtcgacgaggtcgcttatcacgagaagtaccccaccatctaccacctgcgaaagaaattggtggatagcaccgataaagccgacttgcgacttatctacttggctctggcgcacatgattaagttcaggggccacttcctgatcgagggcgaccttaaccccgacaacagtgacgtagacaaattgttcatccagcttgtacagacctataaccagctgttcgaggaaaaccctattaacgccagcggggtggatgcgaaggccatacttagcgccaggctgagcaaaagcaggcgcttggagaacctgatagcccagctgcccggtgaaaagaagaacggcctcttcggtaatctgattgccctgagcctgggcctgacccccaacttcaagagcaacttcgacctggcagaagatgccaagctgcagttgagtaaggacacctatgacgacgacttggacaatctgctcgcccaaatcggcgaccagtacgctgacctgttcctcgccgccaagaacctttctgacgcaatcctgcttagcgatatccttagggtgaacacagagatcaccaaggcccccctgagcgccagcatgatcaagaggtacgacgagcaccatcaggacctgacccttctgaaggccctggtgaggcagcaactgcccgagaagtacaaggagatctttttcgaccagagcaagaacggctacgccggctacatcgacggcggagccagccaagaggagttctacaagttcatcaagcccatcctggagaagatggatggcaccgaggagctgctggtgaagctgaacagggaagatttgctccggaagcagaggacctttgacaacggtagcatcccccaccagatccacctgggcgagctgcacgcaatactgaggcgacaggaggatttctaccccttcctcaaggacaatagggagaaaatcgaaaagattctgaccttcaggatcccctactacgtgggccctcttgccaggggcaacagccgattcgcttggatgacaagaaagagcgaggagaccatcaccccctggaacttcgaggaagtggtggacaaaggagcaagcgcgcagtctttcatcgaacggatgaccaatttcgacaaaaacctgcctaacgagaaggtgctgcccaagcacagcctgctttacgagtacttcaccgtgtacaacgagctcaccaaggtgaaatatgtgaccgagggcatgcgaaaacccgctttcctgagcggcgagcagaagaaggccatcgtggacctgctgttcaagaccaacaggaaggtgaccgtgaagcagctgaaggaggactacttcaagaagatcgagtgctttgatagcgtggaaataagcggcgtggaggacaggttcaacgccagcctgggcacctaccacgacttgttgaagataatcaaagacaaggatttcctggataatgaggagaacgaggatatactcgaggacatcgtgctgactttgaccctgtttgaggaccgagagatgattgaagaaaggctcaaaacctacgcccacctgttcgacgacaaagtgatgaaacaactgaagagacgaagatacaccggctggggcagactgtccaggaagctcatcaacggcattagggacaagcagagcggcaagaccatcctggatttcctgaagtccgacggcttcgccaaccgaaacttcatgcagctgattcacgatgacagcttgaccttcaaggaggacatccagaaggcccaggttagcggccagggcgactccctgcacgaacatattgcaaacctggcaggctcccctgcgatcaagaagggcatactgcagaccgttaaggttgtggacgaattggtcaaggtcatgggcaggcacaagcccgaaaacatagttatagagatggccagagagaaccagaccacccaaaagggccagaagaacagccgggagcgcatgaaaaggatcgaggagggtatcaaggaactcggaagccagatcctcaaagagcaccccgtggagaatacccagctccagaacgagaagctgtacctgtactacctgcagaacggcagggacatgtacgttgaccaggagttggacatcaacaggctttcagactatgacgtggatcacatagtgccccagagctttcttaaagacgatagcatcgacaacaaggtcctgacccgctccgacaaaaacaggggcaaaagcgacaacgtgccaagcgaagaggtggttaaaaagatgaagaactactggaggcaactgctcaacgcgaaattgatcacccagagaaagttcgataacctgaccaaggccgagaggggcggactctccgaacttgacaaagcgggcttcataaagaggcagctggtcgagacccgacagatcacgaagcacgtggcccaaatcctcgacagcagaatgaataccaagtacgatgagaatgacaaactcatcagggaagtgaaagtgattaccctgaagagcaagttggtgtccgactttcgcaaagatttccagttctacaaggtgagggagatcaacaactaccaccatgcccacgacgcatacctgaacgccgtggtcggcaccgccctgattaagaagtatccaaagctggagtccgaatttgtctacggcgactacaaagtttacgatgtgaggaagatgatcgctaagagcgaacaggagatcggcaaggccaccgctaagtatttcttctacagcaacatcatgaactttttcaagaccgagatcacacttgccaacggcgaaatcaggaagaggccgcttatcgagaccaacggtgagaccggcgagatcgtgtgggacaagggcagggacttcgccaccgtgaggaaagtcctgagcatgccccaggtgaatattgtgaaaaaaactgaggtgcagacaggcggctttagcaaggaatccatcctgcccaagaggaacagcgacaagctgatcgcccggaagaaggactgggaccctaagaagtatggaggcttcgacagccccaccgtagcctacagcgtgctggtggtcgcgaaggtagagaaggggaagagcaagaaactgaagagcgtgaaggagctgctcggcataaccatcatggagaggtccagctttgagaagaaccccattgactttttggaagccaagggctacaaagaggtcaaaaaggacctgatcatcaaactccccaagtactccctgtttgaattggagaacggcagaaagaggatgctggcgagcgctggggaactgcaaaagggcaacgaactggcgctgcccagcaagtacgtgaattttctgtacctggcgtcccactacgaaaagctgaaaggcagccccgaggacaacgagcagaagcagctgttcgtggagcagcacaagcattacctggacgagataatcgagcaaatcagcgagttcagcaagagggtgattctggccgacgcgaacctggataaggtcctcagcgcctacaacaagcaccgagacaaacccatcagggagcaggccgagaatatcatacacctgttcaccctgacaaatctgggcgcacctgcggcattcaaatacttcgataccaccatcgacaggaaaaggtacactagcactaaggaggtgctggatgccaccttgatccaccagtccattaccggcctgtatgagaccaggatcgacctgagccagcttggaggcgactctagggcggacccaaaaaagaaaaggaaggtggaattcgctggagacatgagagctgccaacctttggccaagcccgctcatgatcaaacgctctaagaagaacagcctggccttgtccctgacggccgaccagatggtcagtgccttgttggatgctgagccccccatactctattccgagtatgatcctaccagacccttcagtgaagcttcgatgatgggcttactgaccaacctggcagacagggagctggttcacatgatcaactgggcgaagagggtgccaggctttgtggatttgaccctccatgatcaggtccaccttcttgaatgtgcctggctagagatcctgatgattggtctcgtctggcgctccatggagcacccagtgaagctactgtttgctcctaacttgctcttggacaggaaccagggaaaatgtgtagagggcatggtggagatcttcgacatgctgctggctacatcatctcggttccgcatgatgaatctgcagggagaggagtttgtgtgcctcaaatctattattttgcttaattctggagtgtacacatttctgtccagcaccctgaagtctctggaagagaaggaccatatccaccgagtcctggacaagatcacagacactttgatccacctgatggccaaggcaggcctgaccctgcagcagcagcaccagcggctggcccagctcctcctcatcctctcccacatcaggcacatgagtaacaaaggcatggagcatctgtacagcatgaagtgcaagaacgtggtgcccctctatgacctgctgctggaggcggcggacgcccaccgcctacatgcgcccactagccgtggaggggcatccgtggaggagacggaccaaagccacttggccactgcgggctctacttcatcgcattccttgcaaaagtattacatcacgggggaggcagagggtttccctgccacagcttctagaggcagtggagagggcagaggaagtctgctaacatgcggtgacgtcgaggagaatcctggcccaatgaacctgagcaaaaacgtgagcgtgagcgtgtatatgaaggggaacgtcaacaatcatgagtttgagtacgacggggaaggtggtggtgatccttatacaggtaaatattccatgaagatgacgctacgtggtcaaaattccctacccttttcctatgatatcattaccacggcatttcagtatggtttccgcgtatttacaaaataccctgagggaattgttgactattttaaggactcgcttcccgacgcattccagtggaacagacgaattgtgtttgaagatggtggagtactaaacatgagcagtgatatcacatataaagataatgttctgcatggtgacgtcaaggctgagggagtgaacttcccgccgaatgggccagtgatgaagaatgaaattgtgatggaggaaccgactgaagaaacatttactccaaaaaacggggttcttgttggcttttgtcccaaagcgtacttacttaaagacggttcctattactatggaaatatgacaacattttacagatccaagaaatctggccaggcacctcctgggtatcactttgttaagcatcgtctcgtcaagaccaatgtgggacatggatttaagacggttgagcagactgaatatgccactgctcatgtcagtgatcttcccaagttcgaagcttga

SEQ ID NO: 67 - DNA, 7818 bp, Artificial sequence
  cloned, variant sequence 23
atgggcaagcccatccctaaccccctgttggggctggacagcaccgctcccaaaaagaaaaggaaggtgggcattcacggcgtgcctgcggccaccggtgctggagacatgagagctgccaacctttggccaagcccgctcatgatcaaacgctctaagaagaacagcctggccttgtccctgacggccgaccagatggtcagtgccttgttggatgctgagccccccatactctattccgagtatgatcctaccagacccttcagtgaagcttcgatgatgggcttactgaccaacctggcagacagggagctggttcacatgatcaactgggcgaagagggtgccaggctttgtggatttgaccctccatgatcaggtccaccttcttgaatgtgcctggctagagatcctgatgattggtctcgtctggcgctccatggagcacccagtgaagctactgtttgctcctaacttgctcttggacaggaaccagggaaaatgtgtagagggcatggtggagatcttcgacatgctgctggctacatcatctcggttccgcatgatgaatctgcagggagaggagtttgtgtgcctcaaatctattattttgcttaattctggagtgtacacatttctgtccagcaccctgaagtctctggaagagaaggaccatatccaccgagtcctggacaagatcacagacactttgatccacctgatggccaaggcaggcctgaccctgcagcagcagcaccagcggctggcccagctcctcctcatcctctcccacatcaggcacatgagtaacaaaggcatggagcatctgtacagcatgaagtgcaagaacgtggtgcccctctatgacctgctgctggaggcggcggacgcccaccgcctacatgcgcccactagccgtggaggggcatccgtggaggagacggaccaaagccacttggccactgcgggctctacttcatcgcattccttgcaaaagtattacatcacgggggaggcagagggtttccctgccacagctggcgccgacaaaaagtacagcatcggccttgatatcggcaccaatagcgtgggctgggccgttatcacagacgaatacaaggtacccagcaagaagttcaaggtgctggggaatacagacaggcactctatcaagaaaaaccttatcggggctctgctgtttgactcaggcgagaccgccgaggccaccaggttgaagaggaccgcaaggcgaaggtacacccggaggaagaacaggatctgctatctgcaggagatcttcagcaacgagatggccaaggtggacgacagcttcttccacaggctggaggagagcttccttgtcgaggaggataagaagcacgaacgacaccccatcttcggcaacatagtcgacgaggtcgcttatcacgagaagtaccccaccatctaccacctgcgaaagaaattggtggatagcaccgataaagccgacttgcgacttatctacttggctctggcgcacatgattaagttcaggggccacttcctgatcgagggcgaccttaaccccgacaacagtgacgtagacaaattgttcatccagcttgtacagacctataaccagctgttcgaggaaaaccctattaacgccagcggggtggatgcgaaggccatacttagcgccaggctgagcaaaagcaggcgcttggagaacctgatagcccagctgcccggtgaaaagaagaacggcctcttcggtaatctgattgccctgagcctgggcctgacccccaacttcaagagcaacttcgacctggcagaagatgccaagctgcagttgagtaaggacacctatgacgacgacttggacaatctgctcgcccaaatcggcgaccagtacgctgacctgttcctcgccgccaagaacctttctgacgcaatcctgcttagcgatatccttagggtgaacacagagatcaccaaggcccccctgagcgccagcatgatcaagaggtacgacgagcaccatcaggacctgacccttctgaaggccctggtgaggcagcaactgcccgagaagtacaaggagatctttttcgaccagagcaagaacggctacgccggctacatcgacggcggagccagccaagaggagttctacaagttcatcaagcccatcctggagaagatggatggcaccgaggagctgctggtgaagctgaacagggaagatttgctccggaagcagaggacctttgacaacggtagcatcccccaccagatccacctgggcgagctgcacgcaatactgaggcgacaggaggatttctaccccttcctcaaggacaatagggagaaaatcgaaaagattctgaccttcaggatcccctactacgtgggccctcttgccaggggcaacagccgattcgcttggatgacaagaaagagcgaggagaccatcaccccctggaacttcgaggaagtggtggacaaaggagcaagcgcgcagtctttcatcgaacggatgaccaatttcgacaaaaacctgcctaacgagaaggtgctgcccaagcacagcctgctttacgagtacttcaccgtgtacaacgagctcaccaaggtgaaatatgtgaccgagggcatgcgaaaacccgctttcctgagcggcgagcagaagaaggccatcgtggacctgctgttcaagaccaacaggaaggtgaccgtgaagcagctgaaggaggactacttcaagaagatcgagtgctttgatagcgtggaaataagcggcgtggaggacaggttcaacgccagcctgggcacctaccacgacttgttgaagataatcaaagacaaggatttcctggataatgaggagaacgaggatatactcgaggacatcgtgctgactttgaccctgtttgaggaccgagagatgattgaagaaaggctcaaaacctacgcccacctgttcgacgacaaagtgatgaaacaactgaagagacgaagatacaccggctggggcagactgtccaggaagctcatcaacggcattagggacaagcagagcggcaagaccatcctggatttcctgaagtccgacggcttcgccaaccgaaacttcatgcagctgattcacgatgacagcttgaccttcaaggaggacatccagaaggcccaggttagcggccagggcgactccctgcacgaacatattgcaaacctggcaggctcccctgcgatcaagaagggcatactgcagaccgttaaggttgtggacgaattggtcaaggtcatgggcaggcacaagcccgaaaacatagttatagagatggccagagagaaccagaccacccaaaagggccagaagaacagccgggagcgcatgaaaaggatcgaggagggtatcaaggaactcggaagccagatcctcaaagagcaccccgtggagaatacccagctccagaacgagaagctgtacctgtactacctgcagaacggcagggacatgtacgttgaccaggagttggacatcaacaggctttcagactatgacgtggatcacatagtgccccagagctttcttaaagacgatagcatcgacaacaaggtcctgacccgctccgacaaaaacaggggcaaaagcgacaacgtgccaagcgaagaggtggttaaaaagatgaagaactactggaggcaactgctcaacgcgaaattgatcacccagagaaagttcgataacctgaccaaggccgagaggggcggactctccgaacttgacaaagcgggcttcataaagaggcagctggtcgagacccgacagatcacgaagcacgtggcccaaatcctcgacagcagaatgaataccaagtacgatgagaatgacaaactcatcagggaagtgaaagtgattaccctgaagagcaagttggtgtccgactttcgcaaagatttccagttctacaaggtgagggagatcaacaactaccaccatgcccacgacgcatacctgaacgccgtggtcggcaccgccctgattaagaagtatccaaagctggagtccgaatttgtctacggcgactacaaagtttacgatgtgaggaagatgatcgctaagagcgaacaggagatcggcaaggccaccgctaagtatttcttctacagcaacatcatgaactttttcaagaccgagatcacacttgccaacggcgaaatcaggaagaggccgcttatcgagaccaacggtgagaccggcgagatcgtgtgggacaagggcagggacttcgccaccgtgaggaaagtcctgagcatgccccaggtgaatattgtgaaaaaaactgaggtgcagacaggcggctttagcaaggaatccatcctgcccaagaggaacagcgacaagctgatcgcccggaagaaggactgggaccctaagaagtatggaggcttcgacagccccaccgtagcctacagcgtgctggtggtcgcgaaggtagagaaggggaagagcaagaaactgaagagcgtgaaggagctgctcggcataaccatcatggagaggtccagctttgagaagaaccccattgactttttggaagccaagggctacaaagaggtcaaaaaggacctgatcatcaaactccccaagtactccctgtttgaattggagaacggcagaaagaggatgctggcgagcgctggggaactgcaaaagggcaacgaactggcgctgcccagcaagtacgtgaattttctgtacctggcgtcccactacgaaaagctgaaaggcagccccgaggacaacgagcagaagcagctgttcgtggagcagcacaagcattacctggacgagataatcgagcaaatcagcgagttcagcaagagggtgattctggccgacgcgaacctggataaggtcctcagcgcctacaacaagcaccgagacaaacccatcagggagcaggccgagaatatcatacacctgttcaccctgacaaatctgggcgcacctgcggcattcaaatacttcgataccaccatcgacaggaaaaggtacactagcactaaggaggtgctggatgccaccttgatccaccagtccattaccggcctgtatgagaccaggatcgacctgagccagcttggaggcgactctagggcggacccaaaaaagaaaaggaaggtggaattcgctggagacatgagagctgccaacctttggccaagcccgctcatgatcaaacgctctaagaagaacagcctggccttgtccctgacggccgaccagatggtcagtgccttgttggatgctgagccccccatactctattccgagtatgatcctaccagacccttcagtgaagcttcgatgatgggcttactgaccaacctggcagacagggagctggttcacatgatcaactgggcgaagagggtgccaggctttgtggatttgaccctccatgatcaggtccaccttcttgaatgtgcctggctagagatcctgatgattggtctcgtctggcgctccatggagcacccagtgaagctactgtttgctcctaacttgctcttggacaggaaccagggaaaatgtgtagagggcatggtggagatcttcgacatgctgctggctacatcatctcggttccgcatgatgaatctgcagggagaggagtttgtgtgcctcaaatctattattttgcttaattctggagtgtacacatttctgtccagcaccctgaagtctctggaagagaaggaccatatccaccgagtcctggacaagatcacagacactttgatccacctgatggccaaggcaggcctgaccctgcagcagcagcaccagcggctggcccagctcctcctcatcctctcccacatcaggcacatgagtaacaaaggcatggagcatctgtacagcatgaagtgcaagaacgtggtgcccctctatgacctgctgctggaggcggcggacgcccaccgcctacatgcgcccactagccgtggaggggcatccgtggaggagacggaccaaagccacttggccactgcgggctctacttcatcgcattccttgcaaaagtattacatcacgggggaggcagagggtttccctgccacagctcctgcaggtgctggagacatgagagctgccaacctttggccaagcccgctcatgatcaaacgctctaagaagaacagcctggccttgtccctgacggccgaccagatggtcagtgccttgttggatgctgagccccccatactctattccgagtatgatcctaccagacccttcagtgaagcttcgatgatgggcttactgaccaacctggcagacagggagctggttcacatgatcaactgggcgaagagggtgccaggctttgtggatttgaccctccatgatcaggtccaccttcttgaatgtgcctggctagagatcctgatgattggtctcgtctggcgctccatggagcacccagtgaagctactgtttgctcctaacttgctcttggacaggaaccagggaaaatgtgtagagggcatggtggagatcttcgacatgctgctggctacatcatctcggttccgcatgatgaatctgcagggagaggagtttgtgtgcctcaaatctattattttgcttaattctggagtgtacacatttctgtccagcaccctgaagtctctggaagagaaggaccatatccaccgagtcctggacaagatcacagacactttgatccacctgatggccaaggcaggcctgaccctgcagcagcagcaccagcggctggcccagctcctcctcatcctctcccacatcaggcacatgagtaacaaaggcatggagcatctgtacagcatgaagtgcaagaacgtggtgcccctctatgacctgctgctggaggcggcggacgcccaccgcctacatgcgcccactagccgtggaggggcatccgtggaggagacggaccaaagccacttggccactgcgggctctacttcatcgcattccttgcaaaagtattacatcacgggggaggcagagggtttccctgccacagcttctagaggcagtggagagggcagaggaagtctgctaacatgcggtgacgtcgaggagaatcctggcccaatgaacctgagcaaaaacgtgagcgtgagcgtgtatatgaaggggaacgtcaacaatcatgagtttgagtacgacggggaaggtggtggtgatccttatacaggtaaatattccatgaagatgacgctacgtggtcaaaattccctacccttttcctatgatatcattaccacggcatttcagtatggtttccgcgtatttacaaaataccctgagggaattgttgactattttaaggactcgcttcccgacgcattccagtggaacagacgaattgtgtttgaagatggtggagtactaaacatgagcagtgatatcacatataaagataatgttctgcatggtgacgtcaaggctgagggagtgaacttcccgccgaatgggccagtgatgaagaatgaaattgtgatggaggaaccgactgaagaaacatttactccaaaaaacggggttcttgttggcttttgtcccaaagcgtacttacttaaagacggttcctattactatggaaatatgacaacattttacagatccaagaaatctggccaggcacctcctgggtatcactttgttaagcatcgtctcgtcaagaccaatgtgggacatggatttaagacggttgagcagactgaatatgccactgctcatgtcagtgatcttcccaagttcgaagcttga

SEQ ID NO: 68 - DNA, 7827 bp, Artificial sequence
  cloned, variant sequence 24
atgggcaagcccatccctaaccccctgttggggctggacagcaccgctcccaaaaagaaaaggaaggtgggcattcacggcgtgcctgcggccaccggtgctggagacatgagagctgccaacctttggccaagcccgctcatgatcaaacgctctaagaagaacagcctggccttgtccctgacggccgaccagatggtcagtgccttgttggatgctgagccccccatactctattccgagtatgatcctaccagacccttcagtgaagcttcgatgatgggcttactgaccaacctggcagacagggagctggttcacatgatcaactgggcgaagagggtgccaggctttgtggatttgaccctccatgatcaggtccaccttcttgaatgtgcctggctagagatcctgatgattggtctcgtctggcgctccatggagcacccagtgaagctactgtttgctcctaacttgctcttggacaggaaccagggaaaatgtgtagagggcatggtggagatcttcgacatgctgctggctacatcatctcggttccgcatgatgaatctgcagggagaggagtttgtgtgcctcaaatctattattttgcttaattctggagtgtacacatttctgtccagcaccctgaagtctctggaagagaaggaccatatccaccgagtcctggacaagatcacagacactttgatccacctgatggccaaggcaggcctgaccctgcagcagcagcaccagcggctggcccagctcctcctcatcctctcccacatcaggcacatgagtaacaaaggcatggagcatctgtacagcatgaagtgcaagaacgtggtgcccctctatgacctgctgctggaggcggcggacgcccaccgcctacatgcgcccactagccgtggaggggcatccgtggaggagacggaccaaagccacttggccactgcgggctctacttcatcgcattccttgcaaaagtattacatcacgggggaggcagagggtttccctgccacagctggcgccgacaaaaagtacagcatcggccttgatatcggcaccaatagcgtgggctgggccgttatcacagacgaatacaaggtacccagcaagaagttcaaggtgctggggaatacagacaggcactctatcaagaaaaaccttatcggggctctgctgtttgactcaggcgagaccgccgaggccaccaggttgaagaggaccgcaaggcgaaggtacacccggaggaagaacaggatctgctatctgcaggagatcttcagcaacgagatggccaaggtggacgacagcttcttccacaggctggaggagagcttccttgtcgaggaggataagaagcacgaacgacaccccatcttcggcaacatagtcgacgaggtcgcttatcacgagaagtaccccaccatctaccacctgcgaaagaaattggtggatagcaccgataaagccgacttgcgacttatctacttggctctggcgcacatgattaagttcaggggccacttcctgatcgagggcgaccttaaccccgacaacagtgacgtagacaaattgttcatccagcttgtacagacctataaccagctgttcgaggaaaaccctattaacgccagcggggtggatgcgaaggccatacttagcgccaggctgagcaaaagcaggcgcttggagaacctgatagcccagctgcccggtgaaaagaagaacggcctcttcggtaatctgattgccctgagcctgggcctgacccccaacttcaagagcaacttcgacctggcagaagatgccaagctgcagttgagtaaggacacctatgacgacgacttggacaatctgctcgcccaaatcggcgaccagtacgctgacctgttcctcgccgccaagaacctttctgacgcaatcctgcttagcgatatccttagggtgaacacagagatcaccaaggcccccctgagcgccagcatgatcaagaggtacgacgagcaccatcaggacctgacccttctgaaggccctggtgaggcagcaactgcccgagaagtacaaggagatctttttcgaccagagcaagaacggctacgccggctacatcgacggcggagccagccaagaggagttctacaagttcatcaagcccatcctggagaagatggatggcaccgaggagctgctggtgaagctgaacagggaagatttgctccggaagcagaggacctttgacaacggtagcatcccccaccagatccacctgggcgagctgcacgcaatactgaggcgacaggaggatttctaccccttcctcaaggacaatagggagaaaatcgaaaagattctgaccttcaggatcccctactacgtgggccctcttgccaggggcaacagccgattcgcttggatgacaagaaagagcgaggagaccatcaccccctggaacttcgaggaagtggtggacaaaggagcaagcgcgcagtctttcatcgaacggatgaccaatttcgacaaaaacctgcctaacgagaaggtgctgcccaagcacagcctgctttacgagtacttcaccgtgtacaacgagctcaccaaggtgaaatatgtgaccgagggcatgcgaaaacccgctttcctgagcggcgagcagaagaaggccatcgtggacctgctgttcaagaccaacaggaaggtgaccgtgaagcagctgaaggaggactacttcaagaagatcgagtgctttgatagcgtggaaataagcggcgtggaggacaggttcaacgccagcctgggcacctaccacgacttgttgaagataatcaaagacaaggatttcctggataatgaggagaacgaggatatactcgaggacatcgtgctgactttgaccctgtttgaggaccgagagatgattgaagaaaggctcaaaacctacgcccacctgttcgacgacaaagtgatgaaacaactgaagagacgaagatacaccggctggggcagactgtccaggaagctcatcaacggcattagggacaagcagagcggcaagaccatcctggatttcctgaagtccgacggcttcgccaaccgaaacttcatgcagctgattcacgatgacagcttgaccttcaaggaggacatccagaaggcccaggttagcggccagggcgactccctgcacgaacatattgcaaacctggcaggctcccctgcgatcaagaagggcatactgcagaccgttaaggttgtggacgaattggtcaaggtcatgggcaggcacaagcccgaaaacatagttatagagatggccagagagaaccagaccacccaaaagggccagaagaacagccgggagcgcatgaaaaggatcgaggagggtatcaaggaactcggaagccagatcctcaaagagcaccccgtggagaatacccagctccagaacgagaagctgtacctgtactacctgcagaacggcagggacatgtacgttgaccaggagttggacatcaacaggctttcagactatgacgtggatcacatagtgccccagagctttcttaaagacgatagcatcgacaacaaggtcctgacccgctccgacaaaaacaggggcaaaagcgacaacgtgccaagcgaagaggtggttaaaaagatgaagaactactggaggcaactgctcaacgcgaaattgatcacccagagaaagttcgataacctgaccaaggccgagaggggcggactctccgaacttgacaaagcgggcttcataaagaggcagctggtcgagacccgacagatcacgaagcacgtggcccaaatcctcgacagcagaatgaataccaagtacgatgagaatgacaaactcatcagggaagtgaaagtgattaccctgaagagcaagttggtgtccgactttcgcaaagatttccagttctacaaggtgagggagatcaacaactaccaccatgcccacgacgcatacctgaacgccgtggtcggcaccgccctgattaagaagtatccaaagctggagtccgaatttgtctacggcgactacaaagtttacgatgtgaggaagatgatcgctaagagcgaacaggagatcggcaaggccaccgctaagtatttcttctacagcaacatcatgaactttttcaagaccgagatcacacttgccaacggcgaaatcaggaagaggccgcttatcgagaccaacggtgagaccggcgagatcgtgtgggacaagggcagggacttcgccaccgtgaggaaagtcctgagcatgccccaggtgaatattgtgaaaaaaactgaggtgcagacaggcggctttagcaaggaatccatcctgcccaagaggaacagcgacaagctgatcgcccggaagaaggactgggaccctaagaagtatggaggcttcgacagccccaccgtagcctacagcgtgctggtggtcgcgaaggtagagaaggggaagagcaagaaactgaagagcgtgaaggagctgctcggcataaccatcatggagaggtccagctttgagaagaaccccattgactttttggaagccaagggctacaaagaggtcaaaaaggacctgatcatcaaactccccaagtactccctgtttgaattggagaacggcagaaagaggatgctggcgagcgctggggaactgcaaaagggcaacgaactggcgctgcccagcaagtacgtgaattttctgtacctggcgtcccactacgaaaagctgaaaggcagccccgaggacaacgagcagaagcagctgttcgtggagcagcacaagcattacctggacgagataatcgagcaaatcagcgagttcagcaagagggtgattctggccgacgcgaacctggataaggtcctcagcgcctacaacaagcaccgagacaaacccatcagggagcaggccgagaatatcatacacctgttcaccctgacaaatctgggcgcacctgcggcattcaaatacttcgataccaccatcgacaggaaaaggtacactagcactaaggaggtgctggatgccaccttgatccaccagtccattaccggcctgtatgagaccaggatcgacctgagccagcttggaggcgactctagggcggacccaaaaaagaaaaggaaggtggaattcgctggagacatgagagctgccaacctttggccaagcccgctcatgatcaaacgctctaagaagaacagcctggccttgtccctgacggccgaccagatggtcagtgccttgttggatgctgagccccccatactctattccgagtatgatcctaccagacccttcagtgaagcttcgatgatgggcttactgaccaacctggcagacagggagctggttcacatgatcaactgggcgaagagggtgccaggctttgtggatttgaccctccatgatcaggtccaccttcttgaatgtgcctggctagagatcctgatgattggtctcgtctggcgctccatggagcacccagtgaagctactgtttgctcctaacttgctcttggacaggaaccagggaaaatgtgtagagggcatggtggagatcttcgacatgctgctggctacatcatctcggttccgcatgatgaatctgcagggagaggagtttgtgtgcctcaaatctattattttgcttaattctggagtgtacacatttctgtccagcaccctgaagtctctggaagagaaggaccatatccaccgagtcctggacaagatcacagacactttgatccacctgatggccaaggcaggcctgaccctgcagcagcagcaccagcggctggcccagctcctcctcatcctctcccacatcaggcacatgagtaacaaaggcatggagcatctgtacagcatgaagtgcaagaacgtggtgcccctctatgacctgctgctggaggcggcggacgcccaccgcctacatgcgcccactagccgtggaggggcatccgtggaggagacggaccaaagccacttggccactgcgggctctacttcatcgcattccttgcaaaagtattacatcacgggggaggcagagggtttccctgccacagctcctgcaggtggaggctctgctggagacatgagagctgccaacctttggccaagcccgctcatgatcaaacgctctaagaagaacagcctggccttgtccctgacggccgaccagatggtcagtgccttgttggatgctgagccccccatactctattccgagtatgatcctaccagacccttcagtgaagcttcgatgatgggcttactgaccaacctggcagacagggagctggttcacatgatcaactgggcgaagagggtgccaggctttgtggatttgaccctccatgatcaggtccaccttcttgaatgtgcctggctagagatcctgatgattggtctcgtctggcgctccatggagcacccagtgaagctactgtttgctcctaacttgctcttggacaggaaccagggaaaatgtgtagagggcatggtggagatcttcgacatgctgctggctacatcatctcggttccgcatgatgaatctgcagggagaggagtttgtgtgcctcaaatctattattttgcttaattctggagtgtacacatttctgtccagcaccctgaagtctctggaagagaaggaccatatccaccgagtcctggacaagatcacagacactttgatccacctgatggccaaggcaggcctgaccctgcagcagcagcaccagcggctggcccagctcctcctcatcctctcccacatcaggcacatgagtaacaaaggcatggagcatctgtacagcatgaagtgcaagaacgtggtgcccctctatgacctgctgctggaggcggcggacgcccaccgcctacatgcgcccactagccgtggaggggcatccgtggaggagacggaccaaagccacttggccactgcgggctctacttcatcgcattccttgcaaaagtattacatcacgggggaggcagagggtttccctgccacagcttctagaggcagtggagagggcagaggaagtctgctaacatgcggtgacgtcgaggagaatcctggcccaatgaacctgagcaaaaacgtgagcgtgagcgtgtatatgaaggggaacgtcaacaatcatgagtttgagtacgacggggaaggtggtggtgatccttatacaggtaaatattccatgaagatgacgctacgtggtcaaaattccctacccttttcctatgatatcattaccacggcatttcagtatggtttccgcgtatttacaaaataccctgagggaattgttgactattttaaggactcgcttcccgacgcattccagtggaacagacgaattgtgtttgaagatggtggagtactaaacatgagcagtgatatcacatataaagataatgttctgcatggtgacgtcaaggctgagggagtgaacttcccgccgaatgggccagtgatgaagaatgaaattgtgatggaggaaccgactgaagaaacatttactccaaaaaacggggttcttgttggcttttgtcccaaagcgtacttacttaaagacggttcctattactatggaaatatgacaacattttacagatccaagaaatctggccaggcacctcctgggtatcactttgttaagcatcgtctcgtcaagaccaatgtgggacatggatttaagacggttgagcagactgaatatgccactgctcatgtcagtgatcttcccaagttcgaagcttga

SEQ ID NO: 69 - DNA, 8808 bp, Artificial sequence
  cloned, variant sequence 25
atgggcaagcccatccctaaccccctgttggggctggacagcaccgctcccaaaaagaaaaggaaggtgggcattcacggcgtgcctgcggccaccggtgctggagacatgagagctgccaacctttggccaagcccgctcatgatcaaacgctctaagaagaacagcctggccttgtccctgacggccgaccagatggtcagtgccttgttggatgctgagccccccatactctattccgagtatgatcctaccagacccttcagtgaagcttcgatgatgggcttactgaccaacctggcagacagggagctggttcacatgatcaactgggcgaagagggtgccaggctttgtggatttgaccctccatgatcaggtccaccttcttgaatgtgcctggctagagatcctgatgattggtctcgtctggcgctccatggagcacccagtgaagctactgtttgctcctaacttgctcttggacaggaaccagggaaaatgtgtagagggcatggtggagatcttcgacatgctgctggctacatcatctcggttccgcatgatgaatctgcagggagaggagtttgtgtgcctcaaatctattattttgcttaattctggagtgtacacatttctgtccagcaccctgaagtctctggaagagaaggaccatatccaccgagtcctggacaagatcacagacactttgatccacctgatggccaaggcaggcctgaccctgcagcagcagcaccagcggctggcccagctcctcctcatcctctcccacatcaggcacatgagtaacaaaggcatggagcatctgtacagcatgaagtgcaagaacgtggtgcccctctatgacctgctgctggaggcggcggacgcccaccgcctacatgcgcccactagccgtggaggggcatccgtggaggagacggaccaaagccacttggccactgcgggctctacttcatcgcattccttgcaaaagtattacatcacgggggaggcagagggtttccctgccacagctggtggaagtcctaggggaggctctgctggagacatgagagctgccaacctttggccaagcccgctcatgatcaaacgctctaagaagaacagcctggccttgtccctgacggccgaccagatggtcagtgccttgttggatgctgagccccccatactctattccgagtatgatcctaccagacccttcagtgaagcttcgatgatgggcttactgaccaacctggcagacagggagctggttcacatgatcaactgggcgaagagggtgccaggctttgtggatttgaccctccatgatcaggtccaccttcttgaatgtgcctggctagagatcctgatgattggtctcgtctggcgctccatggagcacccagtgaagctactgtttgctcctaacttgctcttggacaggaaccagggaaaatgtgtagagggcatggtggagatcttcgacatgctgctggctacatcatctcggttccgcatgatgaatctgcagggagaggagtttgtgtgcctcaaatctattattttgcttaattctggagtgtacacatttctgtccagcaccctgaagtctctggaagagaaggaccatatccaccgagtcctggacaagatcacagacactttgatccacctgatggccaaggcaggcctgaccctgcagcagcagcaccagcggctggcccagctcctcctcatcctctcccacatcaggcacatgagtaacaaaggcatggagcatctgtacagcatgaagtgcaagaacgtggtgcccctctatgacctgctgctggaggcggcggacgcccaccgcctacatgcgcccactagccgtggaggggcatccgtggaggagacggaccaaagccacttggccactgcgggctctacttcatcgcattccttgcaaaagtattacatcacgggggaggcagagggtttccctgccacagctacaccagaatcgggcgccgacaaaaagtacagcatcggccttgatatcggcaccaatagcgtgggctgggccgttatcacagacgaatacaaggtacccagcaagaagttcaaggtgctggggaatacagacaggcactctatcaagaaaaaccttatcggggctctgctgtttgactcaggcgagaccgccgaggccaccaggttgaagaggaccgcaaggcgaaggtacacccggaggaagaacaggatctgctatctgcaggagatcttcagcaacgagatggccaaggtggacgacagcttcttccacaggctggaggagagcttccttgtcgaggaggataagaagcacgaacgacaccccatcttcggcaacatagtcgacgaggtcgcttatcacgagaagtaccccaccatctaccacctgcgaaagaaattggtggatagcaccgataaagccgacttgcgacttatctacttggctctggcgcacatgattaagttcaggggccacttcctgatcgagggcgaccttaaccccgacaacagtgacgtagacaaattgttcatccagcttgtacagacctataaccagctgttcgaggaaaaccctattaacgccagcggggtggatgcgaaggccatacttagcgccaggctgagcaaaagcaggcgcttggagaacctgatagcccagctgcccggtgaaaagaagaacggcctcttcggtaatctgattgccctgagcctgggcctgacccccaacttcaagagcaacttcgacctggcagaagatgccaagctgcagttgagtaaggacacctatgacgacgacttggacaatctgctcgcccaaatcggcgaccagtacgctgacctgttcctcgccgccaagaacctttctgacgcaatcctgcttagcgatatccttagggtgaacacagagatcaccaaggcccccctgagcgccagcatgatcaagaggtacgacgagcaccatcaggacctgacccttctgaaggccctggtgaggcagcaactgcccgagaagtacaaggagatctttttcgaccagagcaagaacggctacgccggctacatcgacggcggagccagccaagaggagttctacaagttcatcaagcccatcctggagaagatggatggcaccgaggagctgctggtgaagctgaacagggaagatttgctccggaagcagaggacctttgacaacggtagcatcccccaccagatccacctgggcgagctgcacgcaatactgaggcgacaggaggatttctaccccttcctcaaggacaatagggagaaaatcgaaaagattctgaccttcaggatcccctactacgtgggccctcttgccaggggcaacagccgattcgcttggatgacaagaaagagcgaggagaccatcaccccctggaacttcgaggaagtggtggacaaaggagcaagcgcgcagtctttcatcgaacggatgaccaatttcgacaaaaacctgcctaacgagaaggtgctgcccaagcacagcctgctttacgagtacttcaccgtgtacaacgagctcaccaaggtgaaatatgtgaccgagggcatgcgaaaacccgctttcctgagcggcgagcagaagaaggccatcgtggacctgctgttcaagaccaacaggaaggtgaccgtgaagcagctgaaggaggactacttcaagaagatcgagtgctttgatagcgtggaaataagcggcgtggaggacaggttcaacgccagcctgggcacctaccacgacttgttgaagataatcaaagacaaggatttcctggataatgaggagaacgaggatatactcgaggacatcgtgctgactttgaccctgtttgaggaccgagagatgattgaagaaaggctcaaaacctacgcccacctgttcgacgacaaagtgatgaaacaactgaagagacgaagatacaccggctggggcagactgtccaggaagctcatcaacggcattagggacaagcagagcggcaagaccatcctggatttcctgaagtccgacggcttcgccaaccgaaacttcatgcagctgattcacgatgacagcttgaccttcaaggaggacatccagaaggcccaggttagcggccagggcgactccctgcacgaacatattgcaaacctggcaggctcccctgcgatcaagaagggcatactgcagaccgttaaggttgtggacgaattggtcaaggtcatgggcaggcacaagcccgaaaacatagttatagagatggccagagagaaccagaccacccaaaagggccagaagaacagccgggagcgcatgaaaaggatcgaggagggtatcaaggaactcggaagccagatcctcaaagagcaccccgtggagaatacccagctccagaacgagaagctgtacctgtactacctgcagaacggcagggacatgtacgttgaccaggagttggacatcaacaggctttcagactatgacgtggatcacatagtgccccagagctttcttaaagacgatagcatcgacaacaaggtcctgacccgctccgacaaaaacaggggcaaaagcgacaacgtgccaagcgaagaggtggttaaaaagatgaagaactactggaggcaactgctcaacgcgaaattgatcacccagagaaagttcgataacctgaccaaggccgagaggggcggactctccgaacttgacaaagcgggcttcataaagaggcagctggtcgagacccgacagatcacgaagcacgtggcccaaatcctcgacagcagaatgaataccaagtacgatgagaatgacaaactcatcagggaagtgaaagtgattaccctgaagagcaagttggtgtccgactttcgcaaagatttccagttctacaaggtgagggagatcaacaactaccaccatgcccacgacgcatacctgaacgccgtggtcggcaccgccctgattaagaagtatccaaagctggagtccgaatttgtctacggcgactacaaagtttacgatgtgaggaagatgatcgctaagagcgaacaggagatcggcaaggccaccgctaagtatttcttctacagcaacatcatgaactttttcaagaccgagatcacacttgccaacggcgaaatcaggaagaggccgcttatcgagaccaacggtgagaccggcgagatcgtgtgggacaagggcagggacttcgccaccgtgaggaaagtcctgagcatgccccaggtgaatattgtgaaaaaaactgaggtgcagacaggcggctttagcaaggaatccatcctgcccaagaggaacagcgacaagctgatcgcccggaagaaggactgggaccctaagaagtatggaggcttcgacagccccaccgtagcctacagcgtgctggtggtcgcgaaggtagagaaggggaagagcaagaaactgaagagcgtgaaggagctgctcggcataaccatcatggagaggtccagctttgagaagaaccccattgactttttggaagccaagggctacaaagaggtcaaaaaggacctgatcatcaaactccccaagtactccctgtttgaattggagaacggcagaaagaggatgctggcgagcgctggggaactgcaaaagggcaacgaactggcgctgcccagcaagtacgtgaattttctgtacctggcgtcccactacgaaaagctgaaaggcagccccgaggacaacgagcagaagcagctgttcgtggagcagcacaagcattacctggacgagataatcgagcaaatcagcgagttcagcaagagggtgattctggccgacgcgaacctggataaggtcctcagcgcctacaacaagcaccgagacaaacccatcagggagcaggccgagaatatcatacacctgttcaccctgacaaatctgggcgcacctgcggcattcaaatacttcgataccaccatcgacaggaaaaggtacactagcactaaggaggtgctggatgccaccttgatccaccagtccattaccggcctgtatgagaccaggatcgacctgagccagcttggaggcgactctagggcggacccaaaaaagaaaaggaaggtggaattcgctggagacatgagagctgccaacctttggccaagcccgctcatgatcaaacgctctaagaagaacagcctggccttgtccctgacggccgaccagatggtcagtgccttgttggatgctgagccccccatactctattccgagtatgatcctaccagacccttcagtgaagcttcgatgatgggcttactgaccaacctggcagacagggagctggttcacatgatcaactgggcgaagagggtgccaggctttgtggatttgaccctccatgatcaggtccaccttcttgaatgtgcctggctagagatcctgatgattggtctcgtctggcgctccatggagcacccagtgaagctactgtttgctcctaacttgctcttggacaggaaccagggaaaatgtgtagagggcatggtggagatcttcgacatgctgctggctacatcatctcggttccgcatgatgaatctgcagggagaggagtttgtgtgcctcaaatctattattttgcttaattctggagtgtacacatttctgtccagcaccctgaagtctctggaagagaaggaccatatccaccgagtcctggacaagatcacagacactttgatccacctgatggccaaggcaggcctgaccctgcagcagcagcaccagcggctggcccagctcctcctcatcctctcccacatcaggcacatgagtaacaaaggcatggagcatctgtacagcatgaagtgcaagaacgtggtgcccctctatgacctgctgctggaggcggcggacgcccaccgcctacatgcgcccactagccgtggaggggcatccgtggaggagacggaccaaagccacttggccactgcgggctctacttcatcgcattccttgcaaaagtattacatcacgggggaggcagagggtttccctgccacagctcctgcaggtggaggctctgctggagacatgagagctgccaacctttggccaagcccgctcatgatcaaacgctctaagaagaacagcctggccttgtccctgacggccgaccagatggtcagtgccttgttggatgctgagccccccatactctattccgagtatgatcctaccagacccttcagtgaagcttcgatgatgggcttactgaccaacctggcagacagggagctggttcacatgatcaactgggcgaagagggtgccaggctttgtggatttgaccctccatgatcaggtccaccttcttgaatgtgcctggctagagatcctgatgattggtctcgtctggcgctccatggagcacccagtgaagctactgtttgctcctaacttgctcttggacaggaaccagggaaaatgtgtagagggcatggtggagatcttcgacatgctgctggctacatcatctcggttccgcatgatgaatctgcagggagaggagtttgtgtgcctcaaatctattattttgcttaattctggagtgtacacatttctgtccagcaccctgaagtctctggaagagaaggaccatatccaccgagtcctggacaagatcacagacactttgatccacctgatggccaaggcaggcctgaccctgcagcagcagcaccagcggctggcccagctcctcctcatcctctcccacatcaggcacatgagtaacaaaggcatggagcatctgtacagcatgaagtgcaagaacgtggtgcccctctatgacctgctgctggaggcggcggacgcccaccgcctacatgcgcccactagccgtggaggggcatccgtggaggagacggaccaaagccacttggccactgcgggctctacttcatcgcattccttgcaaaagtattacatcacgggggaggcagagggtttccctgccacagcttctagatctagaggcagtggagagggcagaggaagtctgctaacatgcggtgacgtcgaggagaatcctggcccaatgaacctgagcaaaaacgtgagcgtgagcgtgtatatgaaggggaacgtcaacaatcatgagtttgagtacgacggggaaggtggtggtgatccttatacaggtaaatattccatgaagatgacgctacgtggtcaaaattccctacccttttcctatgatatcattaccacggcatttcagtatggtttccgcgtatttacaaaataccctgagggaattgttgactattttaaggactcgcttcccgacgcattccagtggaacagacgaattgtgtttgaagatggtggagtactaaacatgagcagtgatatcacatataaagataatgttctgcatggtgacgtcaaggctgagggagtgaacttcccgccgaatgggccagtgatgaagaatgaaattgtgatggaggaaccgactgaagaaacatttactccaaaaaacggggttcttgttggcttttgtcccaaagcgtacttacttaaagacggttcctattactatggaaatatgacaacattttacagatccaagaaatctggccaggcacctcctgggtatcactttgttaagcatcgtctcgtcaagaccaatgtgggacatggatttaagacggttgagcagactgaatatgccactgctcatgtcagtgatcttcccaagttcgaagcttga

SEQ ID NO: 70 - DNA, 8811 bp, Artificial sequence
  cloned, variant sequence 26
atgggcaagcccatccctaaccccctgttggggctggacagcaccgctcccaaaaagaaaaggaaggtgggcattcacggcgtgcctgcggccaccggtggaggctctgctggagacatgagagctgccaacctttggccaagcccgctcatgatcaaacgctctaagaagaacagcctggccttgtccctgacggccgaccagatggtcagtgccttgttggatgctgagccccccatactctattccgagtatgatcctaccagacccttcagtgaagcttcgatgatgggcttactgaccaacctggcagacagggagctggttcacatgatcaactgggcgaagagggtgccaggctttgtggatttgaccctccatgatcaggtccaccttcttgaatgtgcctggctagagatcctgatgattggtctcgtctggcgctccatggagcacccagtgaagctactgtttgctcctaacttgctcttggacaggaaccagggaaaatgtgtagagggcatggtggagatcttcgacatgctgctggctacatcatctcggttccgcatgatgaatctgcagggagaggagtttgtgtgcctcaaatctattattttgcttaattctggagtgtacacatttctgtccagcaccctgaagtctctggaagagaaggaccatatccaccgagtcctggacaagatcacagacactttgatccacctgatggccaaggcaggcctgaccctgcagcagcagcaccagcggctggcccagctcctcctcatcctctcccacatcaggcacatgagtaacaaaggcatggagcatctgtacagcatgaagtgcaagaacgtggtgcccctctatgacctgctgctggaggcggcggacgcccaccgcctacatgcgcccactagccgtggaggggcatccgtggaggagacggaccaaagccacttggccactgcgggctctacttcatcgcattccttgcaaaagtattacatcacgggggaggcagagggtttccctgccacagctggtggaagtcctaggggaggttctgctggagacatgagagctgccaacctttggccaagcccgctcatgatcaaacgctctaagaagaacagcctggccttgtccctgacggccgaccagatggtcagtgccttgttggatgctgagccccccatactctattccgagtatgatcctaccagacccttcagtgaagcttcgatgatgggcttactgaccaacctggcagacagggagctggttcacatgatcaactgggcgaagagggtgccaggctttgtggatttgaccctccatgatcaggtccaccttcttgaatgtgcctggctagagatcctgatgattggtctcgtctggcgctccatggagcacccagtgaagctactgtttgctcctaacttgctcttggacaggaaccagggaaaatgtgtagagggcatggtggagatcttcgacatgctgctggctacatcatctcggttccgcatgatgaatctgcagggagaggagtttgtgtgcctcaaatctattattttgcttaattctggagtgtacacatttctgtccagcaccctgaagtctctggaagagaaggaccatatccaccgagtcctggacaagatcacagacactttgatccacctgatggccaaggcaggcctgaccctgcagcagcagcaccagcggctggcccagctcctcctcatcctctcccacatcaggcacatgagtaacaaaggcatggagcatctgtacagcatgaagtgcaagaacgtggtgcccctctatgacctgctgctggaggcggcggacgcccaccgcctacatgcgcccactagccgtggaggggcatccgtggaggagacggaccaaagccacttggccactgcgggctctacttcatcgcattccttgcaaaagtattacatcacgggggaggcagagggtttccctgccacagctacaccagaatcgggcgccgacaaaaagtacagcatcggccttgatatcggcaccaatagcgtgggctgggccgttatcacagacgaatacaaggtacccagcaagaagttcaaggtgctggggaatacagacaggcactctatcaagaaaaaccttatcggggctctgctgtttgactcaggcgagaccgccgaggccaccaggttgaagaggaccgcaaggcgaaggtacacccggaggaagaacaggatctgctatctgcaggagatcttcagcaacgagatggccaaggtggacgacagcttcttccacaggctggaggagagcttccttgtcgaggaggataagaagcacgaacgacaccccatcttcggcaacatagtcgacgaggtcgcttatcacgagaagtaccccaccatctaccacctgcgaaagaaattggtggatagcaccgataaagccgacttgcgacttatctacttggctctggcgcacatgattaagttcaggggccacttcctgatcgagggcgaccttaaccccgacaacagtgacgtagacaaattgttcatccagcttgtacagacctataaccagctgttcgaggaaaaccctattaacgccagcggggtggatgcgaaggccatacttagcgccaggctgagcaaaagcaggcgcttggagaacctgatagcccagctgcccggtgaaaagaagaacggcctcttcggtaatctgattgccctgagcctgggcctgacccccaacttcaagagcaacttcgacctggcagaagatgccaagctgcagttgagtaaggacacctatgacgacgacttggacaatctgctcgcccaaatcggcgaccagtacgctgacctgttcctcgccgccaagaacctttctgacgcaatcctgcttagcgatatccttagggtgaacacagagatcaccaaggcccccctgagcgccagcatgatcaagaggtacgacgagcaccatcaggacctgacccttctgaaggccctggtgaggcagcaactgcccgagaagtacaaggagatctttttcgaccagagcaagaacggctacgccggctacatcgacggcggagccagccaagaggagttctacaagttcatcaagcccatcctggagaagatggatggcaccgaggagctgctggtgaagctgaacagggaagatttgctccggaagcagaggacctttgacaacggtagcatcccccaccagatccacctgggcgagctgcacgcaatactgaggcgacaggaggatttctaccccttcctcaaggacaatagggagaaaatcgaaaagattctgaccttcaggatcccctactacgtgggccctcttgccaggggcaacagccgattcgcttggatgacaagaaagagcgaggagaccatcaccccctggaacttcgaggaagtggtggacaaaggagcaagcgcgcagtctttcatcgaacggatgaccaatttcgacaaaaacctgcctaacgagaaggtgctgcccaagcacagcctgctttacgagtacttcaccgtgtacaacgagctcaccaaggtgaaatatgtgaccgagggcatgcgaaaacccgctttcctgagcggcgagcagaagaaggccatcgtggacctgctgttcaagaccaacaggaaggtgaccgtgaagcagctgaaggaggactacttcaagaagatcgagtgctttgatagcgtggaaataagcggcgtggaggacaggttcaacgccagcctgggcacctaccacgacttgttgaagataatcaaagacaaggatttcctggataatgaggagaacgaggatatactcgaggacatcgtgctgactttgaccctgtttgaggaccgagagatgattgaagaaaggctcaaaacctacgcccacctgttcgacgacaaagtgatgaaacaactgaagagacgaagatacaccggctggggcagactgtccaggaagctcatcaacggcattagggacaagcagagcggcaagaccatcctggatttcctgaagtccgacggcttcgccaaccgaaacttcatgcagctgattcacgatgacagcttgaccttcaaggaggacatccagaaggcccaggttagcggccagggcgactccctgcacgaacatattgcaaacctggcaggctcccctgcgatcaagaagggcatactgcagaccgttaaggttgtggacgaattggtcaaggtcatgggcaggcacaagcccgaaaacatagttatagagatggccagagagaaccagaccacccaaaagggccagaagaacagccgggagcgcatgaaaaggatcgaggagggtatcaaggaactcggaagccagatcctcaaagagcaccccgtggagaatacccagctccagaacgagaagctgtacctgtactacctgcagaacggcagggacatgtacgttgaccaggagttggacatcaacaggctttcagactatgacgtggatcacatagtgccccagagctttcttaaagacgatagcatcgacaacaaggtcctgacccgctccgacaaaaacaggggcaaaagcgacaacgtgccaagcgaagaggtggttaaaaagatgaagaactactggaggcaactgctcaacgcgaaattgatcacccagagaaagttcgataacctgaccaaggccgagaggggcggactctccgaacttgacaaagcgggcttcataaagaggcagctggtcgagacccgacagatcacgaagcacgtggcccaaatcctcgacagcagaatgaataccaagtacgatgagaatgacaaactcatcagggaagtgaaagtgattaccctgaagagcaagttggtgtccgactttcgcaaagatttccagttctacaaggtgagggagatcaacaactaccaccatgcccacgacgcatacctgaacgccgtggtcggcaccgccctgattaagaagtatccaaagctggagtccgaatttgtctacggcgactacaaagtttacgatgtgaggaagatgatcgctaagagcgaacaggagatcggcaaggccaccgctaagtatttcttctacagcaacatcatgaactttttcaagaccgagatcacacttgccaacggcgaaatcaggaagaggccgcttatcgagaccaacggtgagaccggcgagatcgtgtgggacaagggcagggacttcgccaccgtgaggaaagtcctgagcatgccccaggtgaatattgtgaaaaaaactgaggtgcagacaggcggctttagcaaggaatccatcctgcccaagaggaacagcgacaagctgatcgcccggaagaaggactgggaccctaagaagtatggaggcttcgacagccccaccgtagcctacagcgtgctggtggtcgcgaaggtagagaaggggaagagcaagaaactgaagagcgtgaaggagctgctcggcataaccatcatggagaggtccagctttgagaagaaccccattgactttttggaagccaagggctacaaagaggtcaaaaaggacctgatcatcaaactccccaagtactccctgtttgaattggagaacggcagaaagaggatgctggcgagcgctggggaactgcaaaagggcaacgaactggcgctgcccagcaagtacgtgaattttctgtacctggcgtcccactacgaaaagctgaaaggcagccccgaggacaacgagcagaagcagctgttcgtggagcagcacaagcattacctggacgagataatcgagcaaatcagcgagttcagcaagagggtgattctggccgacgcgaacctggataaggtcctcagcgcctacaacaagcaccgagacaaacccatcagggagcaggccgagaatatcatacacctgttcaccctgacaaatctgggcgcacctgcggcattcaaatacttcgataccaccatcgacaggaaaaggtacactagcactaaggaggtgctggatgccaccttgatccaccagtccattaccggcctgtatgagaccaggatcgacctgagccagcttggaggcgactctagggcggacccaaaaaagaaaaggaaggtggaattcgctggagacatgagagctgccaacctttggccaagcccgctcatgatcaaacgctctaagaagaacagcctggccttgtccctgacggccgaccagatggtcagtgccttgttggatgctgagccccccatactctattccgagtatgatcctaccagacccttcagtgaagcttcgatgatgggcttactgaccaacctggcagacagggagctggttcacatgatcaactgggcgaagagggtgccaggctttgtggatttgaccctccatgatcaggtccaccttcttgaatgtgcctggctagagatcctgatgattggtctcgtctggcgctccatggagcacccagtgaagctactgtttgctcctaacttgctcttggacaggaaccagggaaaatgtgtagagggcatggtggagatcttcgacatgctgctggctacatcatctcggttccgcatgatgaatctgcagggagaggagtttgtgtgcctcaaatctattattttgcttaattctggagtgtacacatttctgtccagcaccctgaagtctctggaagagaaggaccatatccaccgagtcctggacaagatcacagacactttgatccacctgatggccaaggcaggcctgaccctgcagcagcagcaccagcggctggcccagctcctcctcatcctctcccacatcaggcacatgagtaacaaaggcatggagcatctgtacagcatgaagtgcaagaacgtggtgcccctctatgacctgctgctggaggcggcggacgcccaccgcctacatgcgcccactagccgtggaggggcatccgtggaggagacggaccaaagccacttggccactgcgggctctacttcatcgcattccttgcaaaagtattacatcacgggggaggcagagggtttccctgccacagctcctgcaggtggaggctctgctggagacatgagagctgccaacctttggccaagcccgctcatgatcaaacgctctaagaagaacagcctggccttgtccctgacggccgaccagatggtcagtgccttgttggatgctgagccccccatactctattccgagtatgatcctaccagacccttcagtgaagcttcgatgatgggcttactgaccaacctggcagacagggagctggttcacatgatcaactgggcgaagagggtgccaggctttgtggatttgaccctccatgatcaggtccaccttcttgaatgtgcctggctagagatcctgatgattggtctcgtctggcgctccatggagcacccagtgaagctactgtttgctcctaacttgctcttggacaggaaccagggaaaatgtgtagagggcatggtggagatcttcgacatgctgctggctacatcatctcggttccgcatgatgaatctgcagggagaggagtttgtgtgcctcaaatctattattttgcttaattctggagtgtacacatttctgtccagcaccctgaagtctctggaagagaaggaccatatccaccgagtcctggacaagatcacagacactttgatccacctgatggccaaggcaggcctgaccctgcagcagcagcaccagcggctggcccagctcctcctcatcctctcccacatcaggcacatgagtaacaaaggcatggagcatctgtacagcatgaagtgcaagaacgtggtgcccctctatgacctgctgctggaggcggcggacgcccaccgcctacatgcgcccactagccgtggaggggcatccgtggaggagacggaccaaagccacttggccactgcgggctctacttcatcgcattccttgcaaaagtattacatcacgggggaggcagagggtttccctgccacagcttctagaggcagtggagagggcagaggaagtctgctaacatgcggtgacgtcgaggagaatcctggcccaatgaacctgagcaaaaacgtgagcgtgagcgtgtatatgaaggggaacgtcaacaatcatgagtttgagtacgacggggaaggtggtggtgatccttatacaggtaaatattccatgaagatgacgctacgtggtcaaaattccctacccttttcctatgatatcattaccacggcatttcagtatggtttccgcgtatttacaaaataccctgagggaattgttgactattttaaggactcgcttcccgacgcattccagtggaacagacgaattgtgtttgaagatggtggagtactaaacatgagcagtgatatcacatataaagataatgttctgcatggtgacgtcaaggctgagggagtgaacttcccgccgaatgggccagtgatgaagaatgaaattgtgatggaggaaccgactgaagaaacatttactccaaaaaacggggttcttgttggcttttgtcccaaagcgtacttacttaaagacggttcctattactatggaaatatgacaacattttacagatccaagaaatctggccaggcacctcctgggtatcactttgttaagcatcgtctcgtcaagaccaatgtgggacatggatttaagacggttgagcagactgaatatgccactgctcatgtcagtgatcttcccaagttcgaagcttga

SEQ ID NO: 71 - DNA, 8793 bp, Artificial sequence
  cloned, variant sequence 27
atgggcaagcccatccctaaccccctgttggggctggacagcaccgctcccaaaaagaaaaggaaggtgggcattcacggcgtgcctgcggccaccggtggaggctctgctggagacatgagagctgccaacctttggccaagcccgctcatgatcaaacgctctaagaagaacagcctggccttgtccctgacggccgaccagatggtcagtgccttgttggatgctgagccccccatactctattccgagtatgatcctaccagacccttcagtgaagcttcgatgatgggcttactgaccaacctggcagacagggagctggttcacatgatcaactgggcgaagagggtgccaggctttgtggatttgaccctccatgatcaggtccaccttcttgaatgtgcctggctagagatcctgatgattggtctcgtctggcgctccatggagcacccagtgaagctactgtttgctcctaacttgctcttggacaggaaccagggaaaatgtgtagagggcatggtggagatcttcgacatgctgctggctacatcatctcggttccgcatgatgaatctgcagggagaggagtttgtgtgcctcaaatctattattttgcttaattctggagtgtacacatttctgtccagcaccctgaagtctctggaagagaaggaccatatccaccgagtcctggacaagatcacagacactttgatccacctgatggccaaggcaggcctgaccctgcagcagcagcaccagcggctggcccagctcctcctcatcctctcccacatcaggcacatgagtaacaaaggcatggagcatctgtacagcatgaagtgcaagaacgtggtgcccctctatgacctgctgctggaggcggcggacgcccaccgcctacatgcgcccactagccgtggaggggcatccgtggaggagacggaccaaagccacttggccactgcgggctctacttcatcgcattccttgcaaaagtattacatcacgggggaggcagagggtttccctgccacagctcctaggggaggttctgctggagacatgagagctgccaacctttggccaagcccgctcatgatcaaacgctctaagaagaacagcctggccttgtccctgacggccgaccagatggtcagtgccttgttggatgctgagccccccatactctattccgagtatgatcctaccagacccttcagtgaagcttcgatgatgggcttactgaccaacctggcagacagggagctggttcacatgatcaactgggcgaagagggtgccaggctttgtggatttgaccctccatgatcaggtccaccttcttgaatgtgcctggctagagatcctgatgattggtctcgtctggcgctccatggagcacccagtgaagctactgtttgctcctaacttgctcttggacaggaaccagggaaaatgtgtagagggcatggtggagatcttcgacatgctgctggctacatcatctcggttccgcatgatgaatctgcagggagaggagtttgtgtgcctcaaatctattattttgcttaattctggagtgtacacatttctgtccagcaccctgaagtctctggaagagaaggaccatatccaccgagtcctggacaagatcacagacactttgatccacctgatggccaaggcaggcctgaccctgcagcagcagcaccagcggctggcccagctcctcctcatcctctcccacatcaggcacatgagtaacaaaggcatggagcatctgtacagcatgaagtgcaagaacgtggtgcccctctatgacctgctgctggaggcggcggacgcccaccgcctacatgcgcccactagccgtggaggggcatccgtggaggagacggaccaaagccacttggccactgcgggctctacttcatcgcattccttgcaaaagtattacatcacgggggaggcagagggtttccctgccacagctacaccagaatcgggcgccgacaaaaagtacagcatcggccttgatatcggcaccaatagcgtgggctgggccgttatcacagacgaatacaaggtacccagcaagaagttcaaggtgctggggaatacagacaggcactctatcaagaaaaaccttatcggggctctgctgtttgactcaggcgagaccgccgaggccaccaggttgaagaggaccgcaaggcgaaggtacacccggaggaagaacaggatctgctatctgcaggagatcttcagcaacgagatggccaaggtggacgacagcttcttccacaggctggaggagagcttccttgtcgaggaggataagaagcacgaacgacaccccatcttcggcaacatagtcgacgaggtcgcttatcacgagaagtaccccaccatctaccacctgcgaaagaaattggtggatagcaccgataaagccgacttgcgacttatctacttggctctggcgcacatgattaagttcaggggccacttcctgatcgagggcgaccttaaccccgacaacagtgacgtagacaaattgttcatccagcttgtacagacctataaccagctgttcgaggaaaaccctattaacgccagcggggtggatgcgaaggccatacttagcgccaggctgagcaaaagcaggcgcttggagaacctgatagcccagctgcccggtgaaaagaagaacggcctcttcggtaatctgattgccctgagcctgggcctgacccccaacttcaagagcaacttcgacctggcagaagatgccaagctgcagttgagtaaggacacctatgacgacgacttggacaatctgctcgcccaaatcggcgaccagtacgctgacctgttcctcgccgccaagaacctttctgacgcaatcctgcttagcgatatccttagggtgaacacagagatcaccaaggcccccctgagcgccagcatgatcaagaggtacgacgagcaccatcaggacctgacccttctgaaggccctggtgaggcagcaactgcccgagaagtacaaggagatctttttcgaccagagcaagaacggctacgccggctacatcgacggcggagccagccaagaggagttctacaagttcatcaagcccatcctggagaagatggatggcaccgaggagctgctggtgaagctgaacagggaagatttgctccggaagcagaggacctttgacaacggtagcatcccccaccagatccacctgggcgagctgcacgcaatactgaggcgacaggaggatttctaccccttcctcaaggacaatagggagaaaatcgaaaagattctgaccttcaggatcccctactacgtgggccctcttgccaggggcaacagccgattcgcttggatgacaagaaagagcgaggagaccatcaccccctggaacttcgaggaagtggtggacaaaggagcaagcgcgcagtctttcatcgaacggatgaccaatttcgacaaaaacctgcctaacgagaaggtgctgcccaagcacagcctgctttacgagtacttcaccgtgtacaacgagctcaccaaggtgaaatatgtgaccgagggcatgcgaaaacccgctttcctgagcggcgagcagaagaaggccatcgtggacctgctgttcaagaccaacaggaaggtgaccgtgaagcagctgaaggaggactacttcaagaagatcgagtgctttgatagcgtggaaataagcggcgtggaggacaggttcaacgccagcctgggcacctaccacgacttgttgaagataatcaaagacaaggatttcctggataatgaggagaacgaggatatactcgaggacatcgtgctgactttgaccctgtttgaggaccgagagatgattgaagaaaggctcaaaacctacgcccacctgttcgacgacaaagtgatgaaacaactgaagagacgaagatacaccggctggggcagactgtccaggaagctcatcaacggcattagggacaagcagagcggcaagaccatcctggatttcctgaagtccgacggcttcgccaaccgaaacttcatgcagctgattcacgatgacagcttgaccttcaaggaggacatccagaaggcccaggttagcggccagggcgactccctgcacgaacatattgcaaacctggcaggctcccctgcgatcaagaagggcatactgcagaccgttaaggttgtggacgaattggtcaaggtcatgggcaggcacaagcccgaaaacatagttatagagatggccagagagaaccagaccacccaaaagggccagaagaacagccgggagcgcatgaaaaggatcgaggagggtatcaaggaactcggaagccagatcctcaaagagcaccccgtggagaatacccagctccagaacgagaagctgtacctgtactacctgcagaacggcagggacatgtacgttgaccaggagttggacatcaacaggctttcagactatgacgtggatcacatagtgccccagagctttcttaaagacgatagcatcgacaacaaggtcctgacccgctccgacaaaaacaggggcaaaagcgacaacgtgccaagcgaagaggtggttaaaaagatgaagaactactggaggcaactgctcaacgcgaaattgatcacccagagaaagttcgataacctgaccaaggccgagaggggcggactctccgaacttgacaaagcgggcttcataaagaggcagctggtcgagacccgacagatcacgaagcacgtggcccaaatcctcgacagcagaatgaataccaagtacgatgagaatgacaaactcatcagggaagtgaaagtgattaccctgaagagcaagttggtgtccgactttcgcaaagatttccagttctacaaggtgagggagatcaacaactaccaccatgcccacgacgcatacctgaacgccgtggtcggcaccgccctgattaagaagtatccaaagctggagtccgaatttgtctacggcgactacaaagtttacgatgtgaggaagatgatcgctaagagcgaacaggagatcggcaaggccaccgctaagtatttcttctacagcaacatcatgaactttttcaagaccgagatcacacttgccaacggcgaaatcaggaagaggccgcttatcgagaccaacggtgagaccggcgagatcgtgtgggacaagggcagggacttcgccaccgtgaggaaagtcctgagcatgccccaggtgaatattgtgaaaaaaactgaggtgcagacaggcggctttagcaaggaatccatcctgcccaagaggaacagcgacaagctgatcgcccggaagaaggactgggaccctaagaagtatggaggcttcgacagccccaccgtagcctacagcgtgctggtggtcgcgaaggtagagaaggggaagagcaagaaactgaagagcgtgaaggagctgctcggcataaccatcatggagaggtccagctttgagaagaaccccattgactttttggaagccaagggctacaaagaggtcaaaaaggacctgatcatcaaactccccaagtactccctgtttgaattggagaacggcagaaagaggatgctggcgagcgctggggaactgcaaaagggcaacgaactggcgctgcccagcaagtacgtgaattttctgtacctggcgtcccactacgaaaagctgaaaggcagccccgaggacaacgagcagaagcagctgttcgtggagcagcacaagcattacctggacgagataatcgagcaaatcagcgagttcagcaagagggtgattctggccgacgcgaacctggataaggtcctcagcgcctacaacaagcaccgagacaaacccatcagggagcaggccgagaatatcatacacctgttcaccctgacaaatctgggcgcacctgcggcattcaaatacttcgataccaccatcgacaggaaaaggtacactagcactaaggaggtgctggatgccaccttgatccaccagtccattaccggcctgtatgagaccaggatcgacctgagccagcttggaggcgactctagggcggacccaaaaaagaaaaggaaggtggaattcgctggagacatgagagctgccaacctttggccaagcccgctcatgatcaaacgctctaagaagaacagcctggccttgtccctgacggccgaccagatggtcagtgccttgttggatgctgagccccccatactctattccgagtatgatcctaccagacccttcagtgaagcttcgatgatgggcttactgaccaacctggcagacagggagctggttcacatgatcaactgggcgaagagggtgccaggctttgtggatttgaccctccatgatcaggtccaccttcttgaatgtgcctggctagagatcctgatgattggtctcgtctggcgctccatggagcacccagtgaagctactgtttgctcctaacttgctcttggacaggaaccagggaaaatgtgtagagggcatggtggagatcttcgacatgctgctggctacatcatctcggttccgcatgatgaatctgcagggagaggagtttgtgtgcctcaaatctattattttgcttaattctggagtgtacacatttctgtccagcaccctgaagtctctggaagagaaggaccatatccaccgagtcctggacaagatcacagacactttgatccacctgatggccaaggcaggcctgaccctgcagcagcagcaccagcggctggcccagctcctcctcatcctctcccacatcaggcacatgagtaacaaaggcatggagcatctgtacagcatgaagtgcaagaacgtggtgcccctctatgacctgctgctggaggcggcggacgcccaccgcctacatgcgcccactagccgtggaggggcatccgtggaggagacggaccaaagccacttggccactgcgggctctacttcatcgcattccttgcaaaagtattacatcacgggggaggcagagggtttccctgccacagctcctgcaggtgctggagacatgagagctgccaacctttggccaagcccgctcatgatcaaacgctctaagaagaacagcctggccttgtccctgacggccgaccagatggtcagtgccttgttggatgctgagccccccatactctattccgagtatgatcctaccagacccttcagtgaagcttcgatgatgggcttactgaccaacctggcagacagggagctggttcacatgatcaactgggcgaagagggtgccaggctttgtggatttgaccctccatgatcaggtccaccttcttgaatgtgcctggctagagatcctgatgattggtctcgtctggcgctccatggagcacccagtgaagctactgtttgctcctaacttgctcttggacaggaaccagggaaaatgtgtagagggcatggtggagatcttcgacatgctgctggctacatcatctcggttccgcatgatgaatctgcagggagaggagtttgtgtgcctcaaatctattattttgcttaattctggagtgtacacatttctgtccagcaccctgaagtctctggaagagaaggaccatatccaccgagtcctggacaagatcacagacactttgatccacctgatggccaaggcaggcctgaccctgcagcagcagcaccagcggctggcccagctcctcctcatcctctcccacatcaggcacatgagtaacaaaggcatggagcatctgtacagcatgaagtgcaagaacgtggtgcccctctatgacctgctgctggaggcggcggacgcccaccgcctacatgcgcccactagccgtggaggggcatccgtggaggagacggaccaaagccacttggccactgcgggctctacttcatcgcattccttgcaaaagtattacatcacgggggaggcagagggtttccctgccacagcttctagaggcagtggagagggcagaggaagtctgctaacatgcggtgacgtcgaggagaatcctggcccaatgaacctgagcaaaaacgtgagcgtgagcgtgtatatgaaggggaacgtcaacaatcatgagtttgagtacgacggggaaggtggtggtgatccttatacaggtaaatattccatgaagatgacgctacgtggtcaaaattccctacccttttcctatgatatcattaccacggcatttcagtatggtttccgcgtatttacaaaataccctgagggaattgttgactattttaaggactcgcttcccgacgcattccagtggaacagacgaattgtgtttgaagatggtggagtactaaacatgagcagtgatatcacatataaagataatgttctgcatggtgacgtcaaggctgagggagtgaacttcccgccgaatgggccagtgatgaagaatgaaattgtgatggaggaaccgactgaagaaacatttactccaaaaaacggggttcttgttggcttttgtcccaaagcgtacttacttaaagacggttcctattactatggaaatatgacaacattttacagatccaagaaatctggccaggcacctcctgggtatcactttgttaagcatcgtctcgtcaagaccaatgtgggacatggatttaagacggttgagcagactgaatatgccactgctcatgtcagtgatcttcccaagttcgaagcttga

SEQ ID NO: 72 - DNA, 8802 bp, Artificial sequence
  cloned, variant sequence 28
atgggcaagcccatccctaaccccctgttggggctggacagcaccgctcccaaaaagaaaaggaaggtgggcattcacggcgtgcctgcggccaccggtggaggctctgctggagacatgagagctgccaacctttggccaagcccgctcatgatcaaacgctctaagaagaacagcctggccttgtccctgacggccgaccagatggtcagtgccttgttggatgctgagccccccatactctattccgagtatgatcctaccagacccttcagtgaagcttcgatgatgggcttactgaccaacctggcagacagggagctggttcacatgatcaactgggcgaagagggtgccaggctttgtggatttgaccctccatgatcaggtccaccttcttgaatgtgcctggctagagatcctgatgattggtctcgtctggcgctccatggagcacccagtgaagctactgtttgctcctaacttgctcttggacaggaaccagggaaaatgtgtagagggcatggtggagatcttcgacatgctgctggctacatcatctcggttccgcatgatgaatctgcagggagaggagtttgtgtgcctcaaatctattattttgcttaattctggagtgtacacatttctgtccagcaccctgaagtctctggaagagaaggaccatatccaccgagtcctggacaagatcacagacactttgatccacctgatggccaaggcaggcctgaccctgcagcagcagcaccagcggctggcccagctcctcctcatcctctcccacatcaggcacatgagtaacaaaggcatggagcatctgtacagcatgaagtgcaagaacgtggtgcccctctatgacctgctgctggaggcggcggacgcccaccgcctacatgcgcccactagccgtggaggggcatccgtggaggagacggaccaaagccacttggccactgcgggctctacttcatcgcattccttgcaaaagtattacatcacgggggaggcagagggtttccctgccacagctggtggaagtcctaggggaggttctgctggagacatgagagctgccaacctttggccaagcccgctcatgatcaaacgctctaagaagaacagcctggccttgtccctgacggccgaccagatggtcagtgccttgttggatgctgagccccccatactctattccgagtatgatcctaccagacccttcagtgaagcttcgatgatgggcttactgaccaacctggcagacagggagctggttcacatgatcaactgggcgaagagggtgccaggctttgtggatttgaccctccatgatcaggtccaccttcttgaatgtgcctggctagagatcctgatgattggtctcgtctggcgctccatggagcacccagtgaagctactgtttgctcctaacttgctcttggacaggaaccagggaaaatgtgtagagggcatggtggagatcttcgacatgctgctggctacatcatctcggttccgcatgatgaatctgcagggagaggagtttgtgtgcctcaaatctattattttgcttaattctggagtgtacacatttctgtccagcaccctgaagtctctggaagagaaggaccatatccaccgagtcctggacaagatcacagacactttgatccacctgatggccaaggcaggcctgaccctgcagcagcagcaccagcggctggcccagctcctcctcatcctctcccacatcaggcacatgagtaacaaaggcatggagcatctgtacagcatgaagtgcaagaacgtggtgcccctctatgacctgctgctggaggcggcggacgcccaccgcctacatgcgcccactagccgtggaggggcatccgtggaggagacggaccaaagccacttggccactgcgggctctacttcatcgcattccttgcaaaagtattacatcacgggggaggcagagggtttccctgccacagctacaccagaatcgggcgccgacaaaaagtacagcatcggccttgatatcggcaccaatagcgtgggctgggccgttatcacagacgaatacaaggtacccagcaagaagttcaaggtgctggggaatacagacaggcactctatcaagaaaaaccttatcggggctctgctgtttgactcaggcgagaccgccgaggccaccaggttgaagaggaccgcaaggcgaaggtacacccggaggaagaacaggatctgctatctgcaggagatcttcagcaacgagatggccaaggtggacgacagcttcttccacaggctggaggagagcttccttgtcgaggaggataagaagcacgaacgacaccccatcttcggcaacatagtcgacgaggtcgcttatcacgagaagtaccccaccatctaccacctgcgaaagaaattggtggatagcaccgataaagccgacttgcgacttatctacttggctctggcgcacatgattaagttcaggggccacttcctgatcgagggcgaccttaaccccgacaacagtgacgtagacaaattgttcatccagcttgtacagacctataaccagctgttcgaggaaaaccctattaacgccagcggggtggatgcgaaggccatacttagcgccaggctgagcaaaagcaggcgcttggagaacctgatagcccagctgcccggtgaaaagaagaacggcctcttcggtaatctgattgccctgagcctgggcctgacccccaacttcaagagcaacttcgacctggcagaagatgccaagctgcagttgagtaaggacacctatgacgacgacttggacaatctgctcgcccaaatcggcgaccagtacgctgacctgttcctcgccgccaagaacctttctgacgcaatcctgcttagcgatatccttagggtgaacacagagatcaccaaggcccccctgagcgccagcatgatcaagaggtacgacgagcaccatcaggacctgacccttctgaaggccctggtgaggcagcaactgcccgagaagtacaaggagatctttttcgaccagagcaagaacggctacgccggctacatcgacggcggagccagccaagaggagttctacaagttcatcaagcccatcctggagaagatggatggcaccgaggagctgctggtgaagctgaacagggaagatttgctccggaagcagaggacctttgacaacggtagcatcccccaccagatccacctgggcgagctgcacgcaatactgaggcgacaggaggatttctaccccttcctcaaggacaatagggagaaaatcgaaaagattctgaccttcaggatcccctactacgtgggccctcttgccaggggcaacagccgattcgcttggatgacaagaaagagcgaggagaccatcaccccctggaacttcgaggaagtggtggacaaaggagcaagcgcgcagtctttcatcgaacggatgaccaatttcgacaaaaacctgcctaacgagaaggtgctgcccaagcacagcctgctttacgagtacttcaccgtgtacaacgagctcaccaaggtgaaatatgtgaccgagggcatgcgaaaacccgctttcctgagcggcgagcagaagaaggccatcgtggacctgctgttcaagaccaacaggaaggtgaccgtgaagcagctgaaggaggactacttcaagaagatcgagtgctttgatagcgtggaaataagcggcgtggaggacaggttcaacgccagcctgggcacctaccacgacttgttgaagataatcaaagacaaggatttcctggataatgaggagaacgaggatatactcgaggacatcgtgctgactttgaccctgtttgaggaccgagagatgattgaagaaaggctcaaaacctacgcccacctgttcgacgacaaagtgatgaaacaactgaagagacgaagatacaccggctggggcagactgtccaggaagctcatcaacggcattagggacaagcagagcggcaagaccatcctggatttcctgaagtccgacggcttcgccaaccgaaacttcatgcagctgattcacgatgacagcttgaccttcaaggaggacatccagaaggcccaggttagcggccagggcgactccctgcacgaacatattgcaaacctggcaggctcccctgcgatcaagaagggcatactgcagaccgttaaggttgtggacgaattggtcaaggtcatgggcaggcacaagcccgaaaacatagttatagagatggccagagagaaccagaccacccaaaagggccagaagaacagccgggagcgcatgaaaaggatcgaggagggtatcaaggaactcggaagccagatcctcaaagagcaccccgtggagaatacccagctccagaacgagaagctgtacctgtactacctgcagaacggcagggacatgtacgttgaccaggagttggacatcaacaggctttcagactatgacgtggatcacatagtgccccagagctttcttaaagacgatagcatcgacaacaaggtcctgacccgctccgacaaaaacaggggcaaaagcgacaacgtgccaagcgaagaggtggttaaaaagatgaagaactactggaggcaactgctcaacgcgaaattgatcacccagagaaagttcgataacctgaccaaggccgagaggggcggactctccgaacttgacaaagcgggcttcataaagaggcagctggtcgagacccgacagatcacgaagcacgtggcccaaatcctcgacagcagaatgaataccaagtacgatgagaatgacaaactcatcagggaagtgaaagtgattaccctgaagagcaagttggtgtccgactttcgcaaagatttccagttctacaaggtgagggagatcaacaactaccaccatgcccacgacgcatacctgaacgccgtggtcggcaccgccctgattaagaagtatccaaagctggagtccgaatttgtctacggcgactacaaagtttacgatgtgaggaagatgatcgctaagagcgaacaggagatcggcaaggccaccgctaagtatttcttctacagcaacatcatgaactttttcaagaccgagatcacacttgccaacggcgaaatcaggaagaggccgcttatcgagaccaacggtgagaccggcgagatcgtgtgggacaagggcagggacttcgccaccgtgaggaaagtcctgagcatgccccaggtgaatattgtgaaaaaaactgaggtgcagacaggcggctttagcaaggaatccatcctgcccaagaggaacagcgacaagctgatcgcccggaagaaggactgggaccctaagaagtatggaggcttcgacagccccaccgtagcctacagcgtgctggtggtcgcgaaggtagagaaggggaagagcaagaaactgaagagcgtgaaggagctgctcggcataaccatcatggagaggtccagctttgagaagaaccccattgactttttggaagccaagggctacaaagaggtcaaaaaggacctgatcatcaaactccccaagtactccctgtttgaattggagaacggcagaaagaggatgctggcgagcgctggggaactgcaaaagggcaacgaactggcgctgcccagcaagtacgtgaattttctgtacctggcgtcccactacgaaaagctgaaaggcagccccgaggacaacgagcagaagcagctgttcgtggagcagcacaagcattacctggacgagataatcgagcaaatcagcgagttcagcaagagggtgattctggccgacgcgaacctggataaggtcctcagcgcctacaacaagcaccgagacaaacccatcagggagcaggccgagaatatcatacacctgttcaccctgacaaatctgggcgcacctgcggcattcaaatacttcgataccaccatcgacaggaaaaggtacactagcactaaggaggtgctggatgccaccttgatccaccagtccattaccggcctgtatgagaccaggatcgacctgagccagcttggaggcgactctagggcggacccaaaaaagaaaaggaaggtggaattcgctggagacatgagagctgccaacctttggccaagcccgctcatgatcaaacgctctaagaagaacagcctggccttgtccctgacggccgaccagatggtcagtgccttgttggatgctgagccccccatactctattccgagtatgatcctaccagacccttcagtgaagcttcgatgatgggcttactgaccaacctggcagacagggagctggttcacatgatcaactgggcgaagagggtgccaggctttgtggatttgaccctccatgatcaggtccaccttcttgaatgtgcctggctagagatcctgatgattggtctcgtctggcgctccatggagcacccagtgaagctactgtttgctcctaacttgctcttggacaggaaccagggaaaatgtgtagagggcatggtggagatcttcgacatgctgctggctacatcatctcggttccgcatgatgaatctgcagggagaggagtttgtgtgcctcaaatctattattttgcttaattctggagtgtacacatttctgtccagcaccctgaagtctctggaagagaaggaccatatccaccgagtcctggacaagatcacagacactttgatccacctgatggccaaggcaggcctgaccctgcagcagcagcaccagcggctggcccagctcctcctcatcctctcccacatcaggcacatgagtaacaaaggcatggagcatctgtacagcatgaagtgcaagaacgtggtgcccctctatgacctgctgctggaggcggcggacgcccaccgcctacatgcgcccactagccgtggaggggcatccgtggaggagacggaccaaagccacttggccactgcgggctctacttcatcgcattccttgcaaaagtattacatcacgggggaggcagagggtttccctgccacagctcctgcaggtgctggagacatgagagctgccaacctttggccaagcccgctcatgatcaaacgctctaagaagaacagcctggccttgtccctgacggccgaccagatggtcagtgccttgttggatgctgagccccccatactctattccgagtatgatcctaccagacccttcagtgaagcttcgatgatgggcttactgaccaacctggcagacagggagctggttcacatgatcaactgggcgaagagggtgccaggctttgtggatttgaccctccatgatcaggtccaccttcttgaatgtgcctggctagagatcctgatgattggtctcgtctggcgctccatggagcacccagtgaagctactgtttgctcctaacttgctcttggacaggaaccagggaaaatgtgtagagggcatggtggagatcttcgacatgctgctggctacatcatctcggttccgcatgatgaatctgcagggagaggagtttgtgtgcctcaaatctattattttgcttaattctggagtgtacacatttctgtccagcaccctgaagtctctggaagagaaggaccatatccaccgagtcctggacaagatcacagacactttgatccacctgatggccaaggcaggcctgaccctgcagcagcagcaccagcggctggcccagctcctcctcatcctctcccacatcaggcacatgagtaacaaaggcatggagcatctgtacagcatgaagtgcaagaacgtggtgcccctctatgacctgctgctggaggcggcggacgcccaccgcctacatgcgcccactagccgtggaggggcatccgtggaggagacggaccaaagccacttggccactgcgggctctacttcatcgcattccttgcaaaagtattacatcacgggggaggcagagggtttccctgccacagcttctagaggcagtggagagggcagaggaagtctgctaacatgcggtgacgtcgaggagaatcctggcccaatgaacctgagcaaaaacgtgagcgtgagcgtgtatatgaaggggaacgtcaacaatcatgagtttgagtacgacggggaaggtggtggtgatccttatacaggtaaatattccatgaagatgacgctacgtggtcaaaattccctacccttttcctatgatatcattaccacggcatttcagtatggtttccgcgtatttacaaaataccctgagggaattgttgactattttaaggactcgcttcccgacgcattccagtggaacagacgaattgtgtttgaagatggtggagtactaaacatgagcagtgatatcacatataaagataatgttctgcatggtgacgtcaaggctgagggagtgaacttcccgccgaatgggccagtgatgaagaatgaaattgtgatggaggaaccgactgaagaaacatttactccaaaaaacggggttcttgttggcttttgtcccaaagcgtacttacttaaagacggttcctattactatggaaatatgacaacattttacagatccaagaaatctggccaggcacctcctgggtatcactttgttaagcatcgtctcgtcaagaccaatgtgggacatggatttaagacggttgagcagactgaatatgccactgctcatgtcagtgatcttcccaagttcgaagcttga

SEQ ID NO: 73 - DNA, 8799 bp, Artificial sequence
  cloned, variant sequence 29
atgggcaagcccatccctaaccccctgttggggctggacagcaccgctcccaaaaagaaaaggaaggtgggcattcacggcgtgcctgcggccaccggtgctggagacatgagagctgccaacctttggccaagcccgctcatgatcaaacgctctaagaagaacagcctggccttgtccctgacggccgaccagatggtcagtgccttgttggatgctgagccccccatactctattccgagtatgatcctaccagacccttcagtgaagcttcgatgatgggcttactgaccaacctggcagacagggagctggttcacatgatcaactgggcgaagagggtgccaggctttgtggatttgaccctccatgatcaggtccaccttcttgaatgtgcctggctagagatcctgatgattggtctcgtctggcgctccatggagcacccagtgaagctactgtttgctcctaacttgctcttggacaggaaccagggaaaatgtgtagagggcatggtggagatcttcgacatgctgctggctacatcatctcggttccgcatgatgaatctgcagggagaggagtttgtgtgcctcaaatctattattttgcttaattctggagtgtacacatttctgtccagcaccctgaagtctctggaagagaaggaccatatccaccgagtcctggacaagatcacagacactttgatccacctgatggccaaggcaggcctgaccctgcagcagcagcaccagcggctggcccagctcctcctcatcctctcccacatcaggcacatgagtaacaaaggcatggagcatctgtacagcatgaagtgcaagaacgtggtgcccctctatgacctgctgctggaggcggcggacgcccaccgcctacatgcgcccactagccgtggaggggcatccgtggaggagacggaccaaagccacttggccactgcgggctctacttcatcgcattccttgcaaaagtattacatcacgggggaggcagagggtttccctgccacagctggtggaagtcctaggggaggctctgctggagacatgagagctgccaacctttggccaagcccgctcatgatcaaacgctctaagaagaacagcctggccttgtccctgacggccgaccagatggtcagtgccttgttggatgctgagccccccatactctattccgagtatgatcctaccagacccttcagtgaagcttcgatgatgggcttactgaccaacctggcagacagggagctggttcacatgatcaactgggcgaagagggtgccaggctttgtggatttgaccctccatgatcaggtccaccttcttgaatgtgcctggctagagatcctgatgattggtctcgtctggcgctccatggagcacccagtgaagctactgtttgctcctaacttgctcttggacaggaaccagggaaaatgtgtagagggcatggtggagatcttcgacatgctgctggctacatcatctcggttccgcatgatgaatctgcagggagaggagtttgtgtgcctcaaatctattattttgcttaattctggagtgtacacatttctgtccagcaccctgaagtctctggaagagaaggaccatatccaccgagtcctggacaagatcacagacactttgatccacctgatggccaaggcaggcctgaccctgcagcagcagcaccagcggctggcccagctcctcctcatcctctcccacatcaggcacatgagtaacaaaggcatggagcatctgtacagcatgaagtgcaagaacgtggtgcccctctatgacctgctgctggaggcggcggacgcccaccgcctacatgcgcccactagccgtggaggggcatccgtggaggagacggaccaaagccacttggccactgcgggctctacttcatcgcattccttgcaaaagtattacatcacgggggaggcagagggtttccctgccacagctacaccagaatcgggcgccgacaaaaagtacagcatcggccttgatatcggcaccaatagcgtgggctgggccgttatcacagacgaatacaaggtacccagcaagaagttcaaggtgctggggaatacagacaggcactctatcaagaaaaaccttatcggggctctgctgtttgactcaggcgagaccgccgaggccaccaggttgaagaggaccgcaaggcgaaggtacacccggaggaagaacaggatctgctatctgcaggagatcttcagcaacgagatggccaaggtggacgacagcttcttccacaggctggaggagagcttccttgtcgaggaggataagaagcacgaacgacaccccatcttcggcaacatagtcgacgaggtcgcttatcacgagaagtaccccaccatctaccacctgcgaaagaaattggtggatagcaccgataaagccgacttgcgacttatctacttggctctggcgcacatgattaagttcaggggccacttcctgatcgagggcgaccttaaccccgacaacagtgacgtagacaaattgttcatccagcttgtacagacctataaccagctgttcgaggaaaaccctattaacgccagcggggtggatgcgaaggccatacttagcgccaggctgagcaaaagcaggcgcttggagaacctgatagcccagctgcccggtgaaaagaagaacggcctcttcggtaatctgattgccctgagcctgggcctgacccccaacttcaagagcaacttcgacctggcagaagatgccaagctgcagttgagtaaggacacctatgacgacgacttggacaatctgctcgcccaaatcggcgaccagtacgctgacctgttcctcgccgccaagaacctttctgacgcaatcctgcttagcgatatccttagggtgaacacagagatcaccaaggcccccctgagcgccagcatgatcaagaggtacgacgagcaccatcaggacctgacccttctgaaggccctggtgaggcagcaactgcccgagaagtacaaggagatctttttcgaccagagcaagaacggctacgccggctacatcgacggcggagccagccaagaggagttctacaagttcatcaagcccatcctggagaagatggatggcaccgaggagctgctggtgaagctgaacagggaagatttgctccggaagcagaggacctttgacaacggtagcatcccccaccagatccacctgggcgagctgcacgcaatactgaggcgacaggaggatttctaccccttcctcaaggacaatagggagaaaatcgaaaagattctgaccttcaggatcccctactacgtgggccctcttgccaggggcaacagccgattcgcttggatgacaagaaagagcgaggagaccatcaccccctggaacttcgaggaagtggtggacaaaggagcaagcgcgcagtctttcatcgaacggatgaccaatttcgacaaaaacctgcctaacgagaaggtgctgcccaagcacagcctgctttacgagtacttcaccgtgtacaacgagctcaccaaggtgaaatatgtgaccgagggcatgcgaaaacccgctttcctgagcggcgagcagaagaaggccatcgtggacctgctgttcaagaccaacaggaaggtgaccgtgaagcagctgaaggaggactacttcaagaagatcgagtgctttgatagcgtggaaataagcggcgtggaggacaggttcaacgccagcctgggcacctaccacgacttgttgaagataatcaaagacaaggatttcctggataatgaggagaacgaggatatactcgaggacatcgtgctgactttgaccctgtttgaggaccgagagatgattgaagaaaggctcaaaacctacgcccacctgttcgacgacaaagtgatgaaacaactgaagagacgaagatacaccggctggggcagactgtccaggaagctcatcaacggcattagggacaagcagagcggcaagaccatcctggatttcctgaagtccgacggcttcgccaaccgaaacttcatgcagctgattcacgatgacagcttgaccttcaaggaggacatccagaaggcccaggttagcggccagggcgactccctgcacgaacatattgcaaacctggcaggctcccctgcgatcaagaagggcatactgcagaccgttaaggttgtggacgaattggtcaaggtcatgggcaggcacaagcccgaaaacatagttatagagatggccagagagaaccagaccacccaaaagggccagaagaacagccgggagcgcatgaaaaggatcgaggagggtatcaaggaactcggaagccagatcctcaaagagcaccccgtggagaatacccagctccagaacgagaagctgtacctgtactacctgcagaacggcagggacatgtacgttgaccaggagttggacatcaacaggctttcagactatgacgtggatcacatagtgccccagagctttcttaaagacgatagcatcgacaacaaggtcctgacccgctccgacaaaaacaggggcaaaagcgacaacgtgccaagcgaagaggtggttaaaaagatgaagaactactggaggcaactgctcaacgcgaaattgatcacccagagaaagttcgataacctgaccaaggccgagaggggcggactctccgaacttgacaaagcgggcttcataaagaggcagctggtcgagacccgacagatcacgaagcacgtggcccaaatcctcgacagcagaatgaataccaagtacgatgagaatgacaaactcatcagggaagtgaaagtgattaccctgaagagcaagttggtgtccgactttcgcaaagatttccagttctacaaggtgagggagatcaacaactaccaccatgcccacgacgcatacctgaacgccgtggtcggcaccgccctgattaagaagtatccaaagctggagtccgaatttgtctacggcgactacaaagtttacgatgtgaggaagatgatcgctaagagcgaacaggagatcggcaaggccaccgctaagtatttcttctacagcaacatcatgaactttttcaagaccgagatcacacttgccaacggcgaaatcaggaagaggccgcttatcgagaccaacggtgagaccggcgagatcgtgtgggacaagggcagggacttcgccaccgtgaggaaagtcctgagcatgccccaggtgaatattgtgaaaaaaactgaggtgcagacaggcggctttagcaaggaatccatcctgcccaagaggaacagcgacaagctgatcgcccggaagaaggactgggaccctaagaagtatggaggcttcgacagccccaccgtagcctacagcgtgctggtggtcgcgaaggtagagaaggggaagagcaagaaactgaagagcgtgaaggagctgctcggcataaccatcatggagaggtccagctttgagaagaaccccattgactttttggaagccaagggctacaaagaggtcaaaaaggacctgatcatcaaactccccaagtactccctgtttgaattggagaacggcagaaagaggatgctggcgagcgctggggaactgcaaaagggcaacgaactggcgctgcccagcaagtacgtgaattttctgtacctggcgtcccactacgaaaagctgaaaggcagccccgaggacaacgagcagaagcagctgttcgtggagcagcacaagcattacctggacgagataatcgagcaaatcagcgagttcagcaagagggtgattctggccgacgcgaacctggataaggtcctcagcgcctacaacaagcaccgagacaaacccatcagggagcaggccgagaatatcatacacctgttcaccctgacaaatctgggcgcacctgcggcattcaaatacttcgataccaccatcgacaggaaaaggtacactagcactaaggaggtgctggatgccaccttgatccaccagtccattaccggcctgtatgagaccaggatcgacctgagccagcttggaggcgactctagggcggacccaaaaaagaaaaggaaggtggaattcgctggagacatgagagctgccaacctttggccaagcccgctcatgatcaaacgctctaagaagaacagcctggccttgtccctgacggccgaccagatggtcagtgccttgttggatgctgagccccccatactctattccgagtatgatcctaccagacccttcagtgaagcttcgatgatgggcttactgaccaacctggcagacagggagctggttcacatgatcaactgggcgaagagggtgccaggctttgtggatttgaccctccatgatcaggtccaccttcttgaatgtgcctggctagagatcctgatgattggtctcgtctggcgctccatggagcacccagtgaagctactgtttgctcctaacttgctcttggacaggaaccagggaaaatgtgtagagggcatggtggagatcttcgacatgctgctggctacatcatctcggttccgcatgatgaatctgcagggagaggagtttgtgtgcctcaaatctattattttgcttaattctggagtgtacacatttctgtccagcaccctgaagtctctggaagagaaggaccatatccaccgagtcctggacaagatcacagacactttgatccacctgatggccaaggcaggcctgaccctgcagcagcagcaccagcggctggcccagctcctcctcatcctctcccacatcaggcacatgagtaacaaaggcatggagcatctgtacagcatgaagtgcaagaacgtggtgcccctctatgacctgctgctggaggcggcggacgcccaccgcctacatgcgcccactagccgtggaggggcatccgtggaggagacggaccaaagccacttggccactgcgggctctacttcatcgcattccttgcaaaagtattacatcacgggggaggcagagggtttccctgccacagctcctgcaggtgctggagacatgagagctgccaacctttggccaagcccgctcatgatcaaacgctctaagaagaacagcctggccttgtccctgacggccgaccagatggtcagtgccttgttggatgctgagccccccatactctattccgagtatgatcctaccagacccttcagtgaagcttcgatgatgggcttactgaccaacctggcagacagggagctggttcacatgatcaactgggcgaagagggtgccaggctttgtggatttgaccctccatgatcaggtccaccttcttgaatgtgcctggctagagatcctgatgattggtctcgtctggcgctccatggagcacccagtgaagctactgtttgctcctaacttgctcttggacaggaaccagggaaaatgtgtagagggcatggtggagatcttcgacatgctgctggctacatcatctcggttccgcatgatgaatctgcagggagaggagtttgtgtgcctcaaatctattattttgcttaattctggagtgtacacatttctgtccagcaccctgaagtctctggaagagaaggaccatatccaccgagtcctggacaagatcacagacactttgatccacctgatggccaaggcaggcctgaccctgcagcagcagcaccagcggctggcccagctcctcctcatcctctcccacatcaggcacatgagtaacaaaggcatggagcatctgtacagcatgaagtgcaagaacgtggtgcccctctatgacctgctgctggaggcggcggacgcccaccgcctacatgcgcccactagccgtggaggggcatccgtggaggagacggaccaaagccacttggccactgcgggctctacttcatcgcattccttgcaaaagtattacatcacgggggaggcagagggtttccctgccacagcttctagatctagaggcagtggagagggcagaggaagtctgctaacatgcggtgacgtcgaggagaatcctggcccaatgaacctgagcaaaaacgtgagcgtgagcgtgtatatgaaggggaacgtcaacaatcatgagtttgagtacgacggggaaggtggtggtgatccttatacaggtaaatattccatgaagatgacgctacgtggtcaaaattccctacccttttcctatgatatcattaccacggcatttcagtatggtttccgcgtatttacaaaataccctgagggaattgttgactattttaaggactcgcttcccgacgcattccagtggaacagacgaattgtgtttgaagatggtggagtactaaacatgagcagtgatatcacatataaagataatgttctgcatggtgacgtcaaggctgagggagtgaacttcccgccgaatgggccagtgatgaagaatgaaattgtgatggaggaaccgactgaagaaacatttactccaaaaaacggggttcttgttggcttttgtcccaaagcgtacttacttaaagacggttcctattactatggaaatatgacaacattttacagatccaagaaatctggccaggcacctcctgggtatcactttgttaagcatcgtctcgtcaagaccaatgtgggacatggatttaagacggttgagcagactgaatatgccactgctcatgtcagtgatcttcccaagttcgaagcttga

SEQ ID NO: 74 - DNA, 8802 bp, Artificial sequence
  cloned, variant sequence 30
atgggcaagcccatccctaaccccctgttggggctggacagcaccgctcccaaaaagaaaaggaaggtgggcattcacggcgtgcctgcggccaccggtggaggctctgctggagacatgagagctgccaacctttggccaagcccgctcatgatcaaacgctctaagaagaacagcctggccttgtccctgacggccgaccagatggtcagtgccttgttggatgctgagccccccatactctattccgagtatgatcctaccagacccttcagtgaagcttcgatgatgggcttactgaccaacctggcagacagggagctggttcacatgatcaactgggcgaagagggtgccaggctttgtggatttgaccctccatgatcaggtccaccttcttgaatgtgcctggctagagatcctgatgattggtctcgtctggcgctccatggagcacccagtgaagctactgtttgctcctaacttgctcttggacaggaaccagggaaaatgtgtagagggcatggtggagatcttcgacatgctgctggctacatcatctcggttccgcatgatgaatctgcagggagaggagtttgtgtgcctcaaatctattattttgcttaattctggagtgtacacatttctgtccagcaccctgaagtctctggaagagaaggaccatatccaccgagtcctggacaagatcacagacactttgatccacctgatggccaaggcaggcctgaccctgcagcagcagcaccagcggctggcccagctcctcctcatcctctcccacatcaggcacatgagtaacaaaggcatggagcatctgtacagcatgaagtgcaagaacgtggtgcccctctatgacctgctgctggaggcggcggacgcccaccgcctacatgcgcccactagccgtggaggggcatccgtggaggagacggaccaaagccacttggccactgcgggctctacttcatcgcattccttgcaaaagtattacatcacgggggaggcagagggtttccctgccacagctcctaggggaggctctgctggagacatgagagctgccaacctttggccaagcccgctcatgatcaaacgctctaagaagaacagcctggccttgtccctgacggccgaccagatggtcagtgccttgttggatgctgagccccccatactctattccgagtatgatcctaccagacccttcagtgaagcttcgatgatgggcttactgaccaacctggcagacagggagctggttcacatgatcaactgggcgaagagggtgccaggctttgtggatttgaccctccatgatcaggtccaccttcttgaatgtgcctggctagagatcctgatgattggtctcgtctggcgctccatggagcacccagtgaagctactgtttgctcctaacttgctcttggacaggaaccagggaaaatgtgtagagggcatggtggagatcttcgacatgctgctggctacatcatctcggttccgcatgatgaatctgcagggagaggagtttgtgtgcctcaaatctattattttgcttaattctggagtgtacacatttctgtccagcaccctgaagtctctggaagagaaggaccatatccaccgagtcctggacaagatcacagacactttgatccacctgatggccaaggcaggcctgaccctgcagcagcagcaccagcggctggcccagctcctcctcatcctctcccacatcaggcacatgagtaacaaaggcatggagcatctgtacagcatgaagtgcaagaacgtggtgcccctctatgacctgctgctggaggcggcggacgcccaccgcctacatgcgcccactagccgtggaggggcatccgtggaggagacggaccaaagccacttggccactgcgggctctacttcatcgcattccttgcaaaagtattacatcacgggggaggcagagggtttccctgccacagctacaccagaatcgggcgccgacaaaaagtacagcatcggccttgatatcggcaccaatagcgtgggctgggccgttatcacagacgaatacaaggtacccagcaagaagttcaaggtgctggggaatacagacaggcactctatcaagaaaaaccttatcggggctctgctgtttgactcaggcgagaccgccgaggccaccaggttgaagaggaccgcaaggcgaaggtacacccggaggaagaacaggatctgctatctgcaggagatcttcagcaacgagatggccaaggtggacgacagcttcttccacaggctggaggagagcttccttgtcgaggaggataagaagcacgaacgacaccccatcttcggcaacatagtcgacgaggtcgcttatcacgagaagtaccccaccatctaccacctgcgaaagaaattggtggatagcaccgataaagccgacttgcgacttatctacttggctctggcgcacatgattaagttcaggggccacttcctgatcgagggcgaccttaaccccgacaacagtgacgtagacaaattgttcatccagcttgtacagacctataaccagctgttcgaggaaaaccctattaacgccagcggggtggatgcgaaggccatacttagcgccaggctgagcaaaagcaggcgcttggagaacctgatagcccagctgcccggtgaaaagaagaacggcctcttcggtaatctgattgccctgagcctgggcctgacccccaacttcaagagcaacttcgacctggcagaagatgccaagctgcagttgagtaaggacacctatgacgacgacttggacaatctgctcgcccaaatcggcgaccagtacgctgacctgttcctcgccgccaagaacctttctgacgcaatcctgcttagcgatatccttagggtgaacacagagatcaccaaggcccccctgagcgccagcatgatcaagaggtacgacgagcaccatcaggacctgacccttctgaaggccctggtgaggcagcaactgcccgagaagtacaaggagatctttttcgaccagagcaagaacggctacgccggctacatcgacggcggagccagccaagaggagttctacaagttcatcaagcccatcctggagaagatggatggcaccgaggagctgctggtgaagctgaacagggaagatttgctccggaagcagaggacctttgacaacggtagcatcccccaccagatccacctgggcgagctgcacgcaatactgaggcgacaggaggatttctaccccttcctcaaggacaatagggagaaaatcgaaaagattctgaccttcaggatcccctactacgtgggccctcttgccaggggcaacagccgattcgcttggatgacaagaaagagcgaggagaccatcaccccctggaacttcgaggaagtggtggacaaaggagcaagcgcgcagtctttcatcgaacggatgaccaatttcgacaaaaacctgcctaacgagaaggtgctgcccaagcacagcctgctttacgagtacttcaccgtgtacaacgagctcaccaaggtgaaatatgtgaccgagggcatgcgaaaacccgctttcctgagcggcgagcagaagaaggccatcgtggacctgctgttcaagaccaacaggaaggtgaccgtgaagcagctgaaggaggactacttcaagaagatcgagtgctttgatagcgtggaaataagcggcgtggaggacaggttcaacgccagcctgggcacctaccacgacttgttgaagataatcaaagacaaggatttcctggataatgaggagaacgaggatatactcgaggacatcgtgctgactttgaccctgtttgaggaccgagagatgattgaagaaaggctcaaaacctacgcccacctgttcgacgacaaagtgatgaaacaactgaagagacgaagatacaccggctggggcagactgtccaggaagctcatcaacggcattagggacaagcagagcggcaagaccatcctggatttcctgaagtccgacggcttcgccaaccgaaacttcatgcagctgattcacgatgacagcttgaccttcaaggaggacatccagaaggcccaggttagcggccagggcgactccctgcacgaacatattgcaaacctggcaggctcccctgcgatcaagaagggcatactgcagaccgttaaggttgtggacgaattggtcaaggtcatgggcaggcacaagcccgaaaacatagttatagagatggccagagagaaccagaccacccaaaagggccagaagaacagccgggagcgcatgaaaaggatcgaggagggtatcaaggaactcggaagccagatcctcaaagagcaccccgtggagaatacccagctccagaacgagaagctgtacctgtactacctgcagaacggcagggacatgtacgttgaccaggagttggacatcaacaggctttcagactatgacgtggatcacatagtgccccagagctttcttaaagacgatagcatcgacaacaaggtcctgacccgctccgacaaaaacaggggcaaaagcgacaacgtgccaagcgaagaggtggttaaaaagatgaagaactactggaggcaactgctcaacgcgaaattgatcacccagagaaagttcgataacctgaccaaggccgagaggggcggactctccgaacttgacaaagcgggcttcataaagaggcagctggtcgagacccgacagatcacgaagcacgtggcccaaatcctcgacagcagaatgaataccaagtacgatgagaatgacaaactcatcagggaagtgaaagtgattaccctgaagagcaagttggtgtccgactttcgcaaagatttccagttctacaaggtgagggagatcaacaactaccaccatgcccacgacgcatacctgaacgccgtggtcggcaccgccctgattaagaagtatccaaagctggagtccgaatttgtctacggcgactacaaagtttacgatgtgaggaagatgatcgctaagagcgaacaggagatcggcaaggccaccgctaagtatttcttctacagcaacatcatgaactttttcaagaccgagatcacacttgccaacggcgaaatcaggaagaggccgcttatcgagaccaacggtgagaccggcgagatcgtgtgggacaagggcagggacttcgccaccgtgaggaaagtcctgagcatgccccaggtgaatattgtgaaaaaaactgaggtgcagacaggcggctttagcaaggaatccatcctgcccaagaggaacagcgacaagctgatcgcccggaagaaggactgggaccctaagaagtatggaggcttcgacagccccaccgtagcctacagcgtgctggtggtcgcgaaggtagagaaggggaagagcaagaaactgaagagcgtgaaggagctgctcggcataaccatcatggagaggtccagctttgagaagaaccccattgactttttggaagccaagggctacaaagaggtcaaaaaggacctgatcatcaaactccccaagtactccctgtttgaattggagaacggcagaaagaggatgctggcgagcgctggggaactgcaaaagggcaacgaactggcgctgcccagcaagtacgtgaattttctgtacctggcgtcccactacgaaaagctgaaaggcagccccgaggacaacgagcagaagcagctgttcgtggagcagcacaagcattacctggacgagataatcgagcaaatcagcgagttcagcaagagggtgattctggccgacgcgaacctggataaggtcctcagcgcctacaacaagcaccgagacaaacccatcagggagcaggccgagaatatcatacacctgttcaccctgacaaatctgggcgcacctgcggcattcaaatacttcgataccaccatcgacaggaaaaggtacactagcactaaggaggtgctggatgccaccttgatccaccagtccattaccggcctgtatgagaccaggatcgacctgagccagcttggaggcgactctagggcggacccaaaaaagaaaaggaaggtggaattcgctggagacatgagagctgccaacctttggccaagcccgctcatgatcaaacgctctaagaagaacagcctggccttgtccctgacggccgaccagatggtcagtgccttgttggatgctgagccccccatactctattccgagtatgatcctaccagacccttcagtgaagcttcgatgatgggcttactgaccaacctggcagacagggagctggttcacatgatcaactgggcgaagagggtgccaggctttgtggatttgaccctccatgatcaggtccaccttcttgaatgtgcctggctagagatcctgatgattggtctcgtctggcgctccatggagcacccagtgaagctactgtttgctcctaacttgctcttggacaggaaccagggaaaatgtgtagagggcatggtggagatcttcgacatgctgctggctacatcatctcggttccgcatgatgaatctgcagggagaggagtttgtgtgcctcaaatctattattttgcttaattctggagtgtacacatttctgtccagcaccctgaagtctctggaagagaaggaccatatccaccgagtcctggacaagatcacagacactttgatccacctgatggccaaggcaggcctgaccctgcagcagcagcaccagcggctggcccagctcctcctcatcctctcccacatcaggcacatgagtaacaaaggcatggagcatctgtacagcatgaagtgcaagaacgtggtgcccctctatgacctgctgctggaggcggcggacgcccaccgcctacatgcgcccactagccgtggaggggcatccgtggaggagacggaccaaagccacttggccactgcgggctctacttcatcgcattccttgcaaaagtattacatcacgggggaggcagagggtttccctgccacagctcctgcaggtggaggctctgctggagacatgagagctgccaacctttggccaagcccgctcatgatcaaacgctctaagaagaacagcctggccttgtccctgacggccgaccagatggtcagtgccttgttggatgctgagccccccatactctattccgagtatgatcctaccagacccttcagtgaagcttcgatgatgggcttactgaccaacctggcagacagggagctggttcacatgatcaactgggcgaagagggtgccaggctttgtggatttgaccctccatgatcaggtccaccttcttgaatgtgcctggctagagatcctgatgattggtctcgtctggcgctccatggagcacccagtgaagctactgtttgctcctaacttgctcttggacaggaaccagggaaaatgtgtagagggcatggtggagatcttcgacatgctgctggctacatcatctcggttccgcatgatgaatctgcagggagaggagtttgtgtgcctcaaatctattattttgcttaattctggagtgtacacatttctgtccagcaccctgaagtctctggaagagaaggaccatatccaccgagtcctggacaagatcacagacactttgatccacctgatggccaaggcaggcctgaccctgcagcagcagcaccagcggctggcccagctcctcctcatcctctcccacatcaggcacatgagtaacaaaggcatggagcatctgtacagcatgaagtgcaagaacgtggtgcccctctatgacctgctgctggaggcggcggacgcccaccgcctacatgcgcccactagccgtggaggggcatccgtggaggagacggaccaaagccacttggccactgcgggctctacttcatcgcattccttgcaaaagtattacatcacgggggaggcagagggtttccctgccacagcttctagaggcagtggagagggcagaggaagtctgctaacatgcggtgacgtcgaggagaatcctggcccaatgaacctgagcaaaaacgtgagcgtgagcgtgtatatgaaggggaacgtcaacaatcatgagtttgagtacgacggggaaggtggtggtgatccttatacaggtaaatattccatgaagatgacgctacgtggtcaaaattccctacccttttcctatgatatcattaccacggcatttcagtatggtttccgcgtatttacaaaataccctgagggaattgttgactattttaaggactcgcttcccgacgcattccagtggaacagacgaattgtgtttgaagatggtggagtactaaacatgagcagtgatatcacatataaagataatgttctgcatggtgacgtcaaggctgagggagtgaacttcccgccgaatgggccagtgatgaagaatgaaattgtgatggaggaaccgactgaagaaacatttactccaaaaaacggggttcttgttggcttttgtcccaaagcgtacttacttaaagacggttcctattactatggaaatatgacaacattttacagatccaagaaatctggccaggcacctcctgggtatcactttgttaagcatcgtctcgtcaagaccaatgtgggacatggatttaagacggttgagcagactgaatatgccactgctcatgtcagtgatcttcccaagttcgaagcttga

SEQ ID NO: 75 - DNA, 23 bp, Artificial sequence
  EMX1; Chr2: 73160982; On
gagtccgagcagaagaagaaggg

SEQ ID NO: 76 - DNA, 23 bp, Artificial sequence
  EMX1; Chr5: 45359083; Off 1
gagttagagcagaagaagaaagg

SEQ ID NO: 77 - DNA, 23 bp, Artificial sequence
  EMX1; Chr15: 44109747; Off 2
gagtctaagcagaagaagaagag

SEQ ID NO: 78 - DNA, 23 bp, Artificial sequence
  VEGFA P1; Chr6: 43737313; On
gggtggggggagtttgctcctgg

SEQ ID NO: 79 - DNA, 23 bp, Artificial sequence
  VEGFA P1; Chr15: 65637553; Off 1
ggatggagggagtttgctcctgg

SEQ ID NO: 80 - DNA, 23 bp, Artificial sequence
  VEGFA P1; Chr17: 39796344; Off 2
tagtggagggagcttgctcctgg

SEQ ID NO: 81 - DNA, 23 bp, Artificial sequence
  VEGFA P1; Chr1: 99347667; Off 3
ggggaggggaagtttgctcctgg

SEQ ID NO: 82 - DNA, 23 bp, Artificial sequence
  VEGFA P2; Chr6: 43737454; On
ggtgagtgagtgtgtgcgtgtgg

SEQ ID NO: 83 - DNA, 23 bp, Artificial sequence
  VEGFA P2; Chr9: 16681608; Off 1
agtgagtgagtgtgtgtgtgggg

SEQ ID NO: 84 - DNA, 23 bp, Artificial sequence
  VEGFA P2;Chr5: 89440985; Off 2
agagagtgagtgtgtgcatgagg

SEQ ID NO: 85 - DNA, 23 bp, Artificial sequence
  VEGFA P2; Chr5: 115434659; Off 3
tgtgggtgagtgtgtgcgtgagg

SEQ ID NO: 86 - DNA, 23 bp, Artificial sequence
  VEGFA P2; Chr22: 37662840; Off 4
gctgagtgagtgtatgcgtgtgg

SEQ ID NO: 87 - DNA, 23 bp, Artificial sequence
  WAS I1; ChrX: 48544569; On
tggatggaggaatgaggagttgg

SEQ ID NO: 88 - DNA, 23 bp, Artificial sequence
  WAS I1; Chr1: 30597854; Off 1
tggatggagggatgaggagtggg

SEQ ID NO: 89 - DNA, 23 bp, Artificial sequence
  WAS I1; Chr2: 242451414; Off 2
gggatggagggatgaggagtggg

SEQ ID NO: 90 - DNA, 23 bp, Artificial sequence
  WAS I1, Chr18: 21810215, Off 3
aggagggaggaatggggagttgg

SEQ ID NO: 91 - DNA, 23 bp, Artificial sequence
  WAS I2, ChrX: 48544562, On
cccatccatccagagacacaggg

SEQ ID NO: 92 - DNA, 23 bp, Artificial sequence
  WAS I2; ChrX: 90817748; Off 1
ctcttccacccagagacacaggg

SEQ ID NO: 93 - DNA, 23 bp, Artificial sequence
  TAT; Chr16: 71609818; On
tcctcctgagactccatacctgg

SEQ ID NO: 94 - DNA, 23 bp, Artificial sequence
  TAT; Chr6: 12810776; Off 1
ccatcctgagactccatacctgg

SEQ ID NO: 95 - DNA, 23 bp, Artificial sequence
  FANCF; Chr11: 22647354; On
ggaatcccttctgcagcacctgg

SEQ ID NO: 96 - DNA, 23 bp, Artificial sequence
  FANCF; Chr18: 8707544; Off 1
ggaaccccgtctgcagcaccagg

SEQ ID NO: 97 - DNA, 23 bp, Artificial sequence
  FANCF; Chr10: 43410014; Off 2
ggagtccctcctacagcaccagg

SEQ ID NO: 98 - DNA, 23 bp, Artificial sequence
  FANCF; Chr10: 37953183; Off 3
ggagtccctcctacagcaccagg

SEQ ID NO: 99 - DNA, 23 bp, Artificial sequence
  FANCF; Chr17: 78923961; Off 4
agaggcccctctgcagcaccagg

SEQ ID NO: 100 - DNA, 20 bp, Artificial sequence
  EMX1_On_Set1_FOR
gcccctaaccctatgtagcc

SEQ ID NO: 101 - DNA, 20 bp, Artificial sequence
  EMX1_On_Set1_REV
ggagattggagacacggaga

SEQ ID NO: 102 - DNA, 20 bp, Artificial sequence
  EMX1_On_Set2_FOR
ctgtgtcctcttcctgccct

SEQ ID NO: 103 - DNA, 20 bp, Artificial sequence
  EMX1_On_Set2_REV
ctctccgaggagaaggccaa

SEQ ID NO: 104 - DNA, 22 bp, Artificial sequence
  EMX1_Off1_FOR
ttgagacatggggatagaatca

SEQ ID NO: 105 - DNA, 22 bp, Artificial sequence
  EMX1_Off1_REV
caggaatagccctacaaaggtg

SEQ ID NO: 106 - DNA, 20 bp, Artificial sequence
  EMX1_Off2_FOR
gttctgtaaacgccgtagcc

SEQ ID NO: 107 - DNA, 20 bp, Artificial sequence
  EMX1_Off2_REV
ggatgcagtctgcctttttg

SEQ ID NO: 108 - DNA, 20 bp, Artificial sequence
  PPP1R12C_On_Set1_FOR
gtctaacccccacctcctgt

SEQ ID NO: 109 - DNA, 20 bp, Artificial sequence
  PPP1R12C_On_Set1_REV
acacctaggacgcaccattc

SEQ ID NO: 110 - DNA, 20 bp, Artificial sequence
  PPP1R12C_On_Set2_FOR
cggttaatgtggctctggtt

SEQ ID NO: 111 - DNA, 21 bp, Artificial sequence
  PPP1R12C_On_Set2_REV
cgcacggaggaacaatataaa

SEQ ID NO: 112 - DNA, 20 bp, Artificial sequence
  VEGFA_Promoter1_On_Set1_FOR
ctggacacttcccaaaggac

SEQ ID NO: 113 - DNA, 20 bp, Artificial sequence
  VEGFA_Promoter1_On_Set1_REV
agggagcaggaaagtgaggt

SEQ ID NO: 114 - DNA, 20 bp, Artificial sequence
  VEGFA_Promoter1_On_Set2_FOR
tcactgactaaccccggaac

SEQ ID NO: 115 - DNA, 20 bp, Artificial sequence
  VEGFA_Promoter1_On_Set2_REV
ctgagagccgttccctcttt

SEQ ID NO: 116 - DNA, 21 bp, Artificial sequence
  VEGFA_Promoter1_Off1_FOR
gggctagagtgtagtggcaca

SEQ ID NO: 117 - DNA, 21 bp, Artificial sequence
  VEGFA_Promoter1_Off1_REV
gccctgttttcatcctacaca

SEQ ID NO: 118 - DNA, 20 bp, Artificial sequence
  VEGFA_Promoter1_Off2_FOR
aagttgggcaagagtccaga

SEQ ID NO: 119 - DNA, 20 bp, Artificial sequence
  VEGFA_Promoter1_Off2_REV
accagcagaggaagggctat

SEQ ID NO: 120 - DNA, 20 bp, Artificial sequence
  VEGFA_Promoter1_Off3_FOR
tgccatttttaagccatcag

SEQ ID NO: 121 - DNA, 20 bp, Artificial sequence
  VEGFA_Promoter1_Off3_REV
agcccattctttttgcagtg

SEQ ID NO: 122 - DNA, 20 bp, Artificial sequence
  VEGFA_Promoter2_On_FOR
ccagatggcacattgtcaga

SEQ ID NO: 123 - DNA, 20 bp, Artificial sequence
  VEGFA_Promoter2_On_REV
ccaaggttcacagcctgaaa

SEQ ID NO: 124 - DNA, 20 bp, Artificial sequence
  VEGFA_Promoter2_Off1_FOR
gccgtctgttagagggacaa

SEQ ID NO: 125 - DNA, 20 bp, Artificial sequence
  VEGFA_Promoter2_Off1_REV
gtcttcccccaacctccagt

SEQ ID NO: 126 - DNA, 22 bp, Artificial sequence
  VEGFA_Promoter2_Off2_FOR
ggcccaatcttagtgtttcaga

SEQ ID NO: 127 - DNA, 22 bp, Artificial sequence
  VEGFA_Promoter2_Off2_REV
tggttaaaagcaaaggatgtga

SEQ ID NO: 128 - DNA, 22 bp, Artificial sequence
  VEGFA_Promoter2_Off3_FOR
ccctcgctagatactgaggaaa

SEQ ID NO: 129 - DNA, 21 bp, Artificial sequence
  VEGFA_Promoter2_Off3_REV
tggccaagataaggaaacaac

SEQ ID NO: 130 - DNA, 20 bp, Artificial sequence
  VEGFA_Promoter2_Off4_FOR
tgattccgctgacacgtaac

SEQ ID NO: 131 - DNA, 20 bp, Artificial sequence
  VEGFA_Promoter2_Off4_REV
ttcagagcctctcaccacct

SEQ ID NO: 132 - DNA, 20 bp, Artificial sequence
  WAS_Intron1-2_On_Set1_FOR
cagccaatgaaggtgagtcc

SEQ ID NO: 133 - DNA, 20 bp, Artificial sequence
  WAS_Intron1-2_On_Set1_REV
gtggatcccacaaaccattc

SEQ ID NO: 134 - DNA, 20 bp, Artificial sequence
  WAS_Intron1-2_On_Set2_FOR
aggaatcagaggcaaagtgg

SEQ ID NO: 135 - DNA, 20 bp, Artificial sequence
  WAS_Intron1-2_On_Set2_REV
tcccatcaattcatccctct

SEQ ID NO: 136 - DNA, 20 bp, Artificial sequence
  WAS_Intron1_Off1_FOR
ctgtcctctctgcaggaacc

SEQ ID NO: 137 - DNA, 20 bp, Artificial sequence
  WAS_Intron1_Off1_REV
gtctggatccctgcatcact

SEQ ID NO: 138 - DNA, 20 bp, Artificial sequence
  WAS_Intron1_Off2_FOR
cgaggttccagaatgctctt

SEQ ID NO: 139 - DNA, 20 bp, Artificial sequence
  WAS_Intron1_Off2_REV
gggaggctaaaccctgaaac

SEQ ID NO: 140 - DNA, 20 bp, Artificial sequence
  WAS_Intron1_Off3_FOR
tcttcaatgttcccccacat

SEQ ID NO: 141 - DNA, 20 bp, Artificial sequence
  WAS_Intron1_Off3_REV
aggctgccattgtctgaagt

SEQ ID NO: 142 - DNA, 23 bp, Artificial sequence
  WAS_Intron2_Off1_Set1_FOR
tctcagagatacaagggaaatcg

SEQ ID NO: 143 - DNA, 23 bp, Artificial sequence
  WAS_Intron2_Off1_Set1_REV
ccagcagactctgggtctattta

SEQ ID NO: 144 - DNA, 21 bp, Artificial sequence
  WAS_Intron2_Off1_Set2_FOR
tacaagggaaatcgtgagacc

SEQ ID NO: 145 - DNA, 21 bp, Artificial sequence
  WAS_Intron2_Off1_Set2_REV
agtcagcatgcagattctggt

SEQ ID NO: 146 - DNA, 22 bp, Artificial sequence
  TAT_On_FOR
gacaacatgaaggtgaaaccaa

SEQ ID NO: 147 - DNA, 22 bp, Artificial sequence
  TAT_On_REV
gtcaaagaaagccaggaaagaa

SEQ ID NO: 148 - DNA, 20 bp, Artificial sequence
  TAT_Off1_FOR
tgtggttggttggtttgttg

SEQ ID NO: 149 - DNA, 20 bp, Artificial sequence
  TAT_Off1_REV
gtgaccaagcaggctctttc

SEQ ID NO: 150 - DNA, 20 bp, Artificial sequence
  FANCF_On_FOR
acctctttgtgtggcgaaag

SEQ ID NO: 151 - DNA, 20 bp, Artificial sequence
  FANCF_On_REV
ccaggctctcttggagtgtc

SEQ ID NO: 152 - DNA, 20 bp, Artificial sequence
  FANCF_Off1_FOR
cagacttcaccaccatgcac

SEQ ID NO: 153 - DNA, 20 bp, Artificial sequence
  FANCF_Off1_REV
ggccagtcctttgtaagcat

SEQ ID NO: 154 - DNA, 22 bp, Artificial sequence
  FANCF_Off2_FOR
aatgtaagaggcaaccaaagga

SEQ ID NO: 155 - DNA, 22 bp, Artificial sequence
  FANCF_Off2_REV
gttaatggaaggtgaaggcagt

SEQ ID NO: 156 - DNA, 21 bp, Artificial sequence
  FANCF_Off3_FOR
aatgcaagaggcaaacaaaaa

SEQ ID NO: 157 - DNA, 21 bp, Artificial sequence
  FANCF_Off3_REV
ccaacatcttcacaagggttc

SEQ ID NO: 158 - DNA, 20 bp, Artificial sequence
  FANCF_Off4_FOR
caaccttcatccttggcttg

SEQ ID NO: 159 - DNA, 21 bp, Artificial sequence
  FANCF_Off4_REV
gagacagagccatgcaaccta

SEQ ID NO: 160 - DNA, 20 bp, Artificial sequence
  CTNNB1_On_FOR
gccaccagcaggaatctagt

SEQ ID NO: 161 - DNA, 23 bp, Artificial sequence
  CTNNB1_On_REV
tcaaaactgcattctgactttca

SEQ ID NO: 162 - DNA, 20 bp, Artificial sequence
  ADAR1_On_FOR
gggcaggaacctgtcataaa

SEQ ID NO: 163 - DNA, 20 bp, Artificial sequence
  ADAR1_On_REV
cccttgttcagccaagattc

SEQ ID NO: 164 - DNA, 21 bp, Artificial sequence
  TCF7_On_FOR
ttccttcccaagtcaggaact

SEQ ID NO: 165 - DNA, 21 bp, Artificial sequence
  TCF7_On_REV
tatgggagaaaagaccagcac

SEQ ID NO: 166 - DNA, 20 bp, Artificial sequence
  PARP4_On_FOR
ggacttccagctttttgcac

SEQ ID NO: 167 - DNA, 20 bp, Artificial sequence
  PARP4_On_REV
ttgctctcgggattttagga

SEQ ID NO: 168 - DNA, 19 bp, Artificial sequence
  ASXL2_On_FOR
catggcagcccctttctat

SEQ ID NO: 169 - DNA, 20 bp, Artificial sequence
  ASXL2_On_REV
gcctggccataagtcatttt

SEQ ID NO: 170 - DNA, 34 bp, Artificial sequence
  EMX1_On_Adapter_FOR
gcgttatcgaggtcgggcctcctgagtttctcat

SEQ ID NO: 171 - DNA, 34 bp, Artificial sequence
  EMX1_On_Adapter_REV
gtgctcttccgatctgtggttgcccaccctagtc

SEQ ID NO: 172 - DNA, 38 bp, Artificial sequence
  EMX1_Off1_Adapter_FOR
gcgttatcgaggtctgcacatgtatgtacaggagtcat

SEQ ID NO: 173 - DNA, 40 bp, Artificial sequence
  EMX1_Off1_Adapter_REV
gtgctcttccgatctcaccttttaagatctgacagagaaa

SEQ ID NO: 174 - DNA, 36 bp, Artificial sequence
  EMX1_Off2_Adapter_FOR
gcgttatcgaggtctgggcgagaaaggtaacttatg

SEQ ID NO: 175 - DNA, 37 bp, Artificial sequence
  EMX1_Off2_Adapter_REV
gtgctcttccgatctactgtttcactgcctaccttcc

SEQ ID NO: 176 - DNA, 34 bp, Artificial sequence
  PPP1R12C_On_Adapter_Set1_FOR
gcgttatcgaggtcgatcagtgaaacgcaccaga

SEQ ID NO: 177 - DNA, 35 bp, Artificial sequence
  PPP1R12C_On_Adapter_Set1_REV
gtgctcttccgatctgtctaacccccacctcctgt

SEQ ID NO: 178 - DNA, 35 bp, Artificial sequence
  PPP1R12C_On_Adapter_Set2_FOR
gcgttatcgaggtcgtcagagcagctcaggttctg

SEQ ID NO: 179 - DNA, 37 bp, Artificial sequence
  PPP1R12C_On_Adapter_Set2_REV
gtgctcttccgatcttaggcctcctccttcctagtct

SEQ ID NO: 180 - DNA, 34 bp, Artificial sequence
  VEGFA_Promoter1_On_Adapter_FOR
gcgttatcgaggtcgcacattgtcagagggacac

SEQ ID NO: 181 - DNA, 35 bp, Artificial sequence
  VEGFA_Promoter1_On_Adapter_REV
gtgctcttccgatctcacacgtcctcactctcgaa

SEQ ID NO: 182 - DNA, 34 bp, Artificial sequence
  VEGFA_Promoter1_Off1_Adapter_FOR
gcgttatcgaggtctctcaaactcctgggctcaa

SEQ ID NO: 183 - DNA, 35 bp, Artificial sequence
  VEGFA_Promoter1_Off1_Adapter_REV
gtgctcttccgatctctggtttttggtttgggaaa

SEQ ID NO: 184 - DNA, 34 bp, Artificial sequence
  VEGFA_Promoter1_Off2_Adapter_FOR
gcgttatcgaggtcccctctccatgaaactttgc

SEQ ID NO: 185 - DNA, 35 bp, Artificial sequence
  VEGFA_Promoter1_Off2_Adapter_REV
gtgctcttccgatctagggcaaaacaggagaacag

SEQ ID NO: 186 - DNA, 34 bp, Artificial sequence
  VEGFA_Promoter1_Off3_Adapter_FOR
gcgttatcgaggtcgcatctctgccttcattgct

SEQ ID NO: 187 - DNA, 35 bp, Artificial sequence
  VEGFA_Promoter1_Off3_Adapter_REV
gtgctcttccgatctgcctactccagggtttctca

SEQ ID NO: 188 - DNA, 33 bp, Artificial sequence
  VEGFA_Promoter2_On_Adapter_FOR
gcgttatcgaggtcgcagacggcagtcactagg

SEQ ID NO: 189 - DNA, 34 bp, Artificial sequence
  VEGFA_Promoter2_On_Adapter_REV
gtgctcttccgatctccgttccctctttgctagg

SEQ ID NO: 190 - DNA, 32 bp, Artificial sequence
  VEGFA_Promoter2_Off1_Adapter_FOR
gcgttatcgaggtcgatccggtgctgcagtga

SEQ ID NO: 191 - DNA, 34 bp, Artificial sequence
  VEGFA_Promoter2_Off1_Adapter_REV
gtgctcttccgatctgctctccacctcgatgtca

SEQ ID NO: 192 - DNA, 34 bp, Artificial sequence
  VEGFA_Promoter2_Off2_Adapter_FOR
gcgttatcgaggtctcaaagtttcacatggttgc

SEQ ID NO: 193 - DNA, 33 bp, Artificial sequence
  VEGFA_Promoter2_Off2_Adapter_REV
gtgctcttccgatctgtgtggagggtgggacct

SEQ ID NO: 194 - DNA, 36 bp, Artificial sequence
  VEGFA_Promoter2_Off3_Adapter_FOR
gcgttatcgaggtcattatgcgtattcagggtgtgc

SEQ ID NO: 195 - DNA, 38 bp, Artificial sequence
  VEGFA_Promoter2_Off3_Adapter_REV
gtgctcttccgatctgctggtcagagggtacaactttt

SEQ ID NO: 196 - DNA, 35 bp, Artificial sequence
  VEGFA_Promoter2_Off4_Adapter_FOR
gcgttatcgaggtcggttaggagagctggcttgga

SEQ ID NO: 197 - DNA, 32 bp, Artificial sequence
  VEGFA_Promoter2_Off4_Adapter_REV
gtgctcttccgatctctggcctcggcctctca

SEQ ID NO: 198 - DNA, 34 bp, Artificial sequence
  WAS_Intron1-2_On_Adapter_FOR
gcgttatcgaggtcggcagggctgtgataactct

SEQ ID NO: 199 - DNA, 34 bp, Artificial sequence
  WAS_Intron1-2_On_Adapter_REV
gtgctcttccgatctatctaccgccaatccatcc

SEQ ID NO: 200 - DNA, 35 bp, Artificial sequence
  WAS_Intron1_Off1_Adapter_FOR
gcgttatcgaggtcacggcatggaattatttggtt

SEQ ID NO: 201 - DNA, 36 bp, Artificial sequence
  WAS_Intron1_Off1_Adapter_REV
gtgctcttccgatctgcctgggagagaaatcaactc

SEQ ID NO: 202 - DNA, 36 bp, Artificial sequence
  WAS_Intron1_Off2_Adapter_FOR
gcgttatcgaggtcactgtgtaggaagcccactctc

SEQ ID NO: 203 - DNA, 37 bp, Artificial sequence
  WAS_Intron1_Off2_Adapter_REV
gtgctcttccgatctaaagcttggtgacagtgaaatg

SEQ ID NO: 204 - DNA, 34 bp, Artificial sequence
  WAS_Intron1_Off3_Adapter_FOR
gcgttatcgaggtccatgaagggaagaggtgcat

SEQ ID NO: 205 - DNA, 35 bp, Artificial sequence
  WAS_Intron1_Off3_Adapter_REV
gtgctcttccgatctccaacgtgaccctttttgag

SEQ ID NO: 206 - DNA, 34 bp, Artificial sequence
  WAS_Intron2_Off1_Adapter_FOR
gcgttatcgaggtctcacagtctcttcccctgct

SEQ ID NO: 207 - DNA, 35 bp, Artificial sequence
  WAS_Intron2_Off1_Adapter_REV
gtgctcttccgatctcttggccagtgtctttccat

SEQ ID NO: 208 - DNA, 34 bp, Artificial sequence
  TAT_On_Adapter_FOR
gcgttatcgaggtctgtgtttggaaacctgccta

SEQ ID NO: 209 - DNA, 35 bp, Artificial sequence
  TAT_On_Adapter_REV
gtgctcttccgatctccaaatccaaaggaccatgt

SEQ ID NO: 210 - DNA, 34 bp, Artificial sequence
  TAT_Off1_Adapter_FOR
gcgttatcgaggtccatcccctggcatctagaaa

SEQ ID NO: 211 - DNA, 35 bp, Artificial sequence
  TAT_Off1_Adapter_REV
gtgctcttccgatcttcactacctggtggctatgg

SEQ ID NO: 212 - DNA, 34 bp, Artificial sequence
  FANCF_On_Adapter_FOR
gcgttatcgaggtcagcattgcagagaggcgtat

SEQ ID NO: 213 - DNA, 34 bp, Artificial sequence
  FANCF_On_Adapter_REV
gtgctcttccgatctatggatgtggcgcaggtag

SEQ ID NO: 214 - DNA, 34 bp, Artificial sequence
  FANCF_Off1_Adapter_FOR
gcgttatcgaggtccacagattgatgccactgga

SEQ ID NO: 215 - DNA, 35 bp, Artificial sequence
  FANCF_Off1_Adapter_REV
gtgctcttccgatctacgccagcactttctaagga

SEQ ID NO: 216 - DNA, 35 bp, Artificial sequence
  FANCF_Off2-3_Adapter_FOR
gcgttatcgaggtcttaccagatggaggacagtga

SEQ ID NO: 217 - DNA, 36 bp, Artificial sequence
  FANCF_Off2-3_Adapter_REV
gtgctcttccgatctaccagtttgagacctctgacc

SEQ ID NO: 218 - DNA, 34 bp, Artificial sequence
  FANCF_Off4_Adapter_FOR
gcgttatcgaggtcggctctgggtacagttctgc

SEQ ID NO: 219 - DNA, 35 bp, Artificial sequence
  FANCF_Off4_Adapter_REV
gtgctcttccgatctgccacagacgaagacacaga

SEQ ID NO: 220 - protein, 2041 aa, Artificial sequence
  #Cas9 variant 1
APKKKRKVGIHGVPAATGAGDMRAANLWPSPLMIKRSKKNSLALSLTADQMVSALLDAEPPILYSEYDPTRPFSEASMMGLLTNLADRELVHMINWAKRVPGFVDLTLHDQVHLLECAWLEILMIGLVWRSMEHPVKLLFAPNLLLDRNQGKCVEGMVEIFDMLLATSSRFRMMNLQGEEFVCLKSIILLNSGVYTFLSSTLKSLEEKDHIHRVLDKITDTLIHLMAKAGLTLQQQHQRLAQLLLILSHIRHMSNKGMEHLYSMKCKNVVPLYDLLLEAADAHRLHAPTSRGGASVEETDQSHLATAGSTSSHSLQKYYITGEAEGFPATASGSETPGTSESAGADKKYSIGLDIGTNSVGWAVITDEYKVPSKKFKVLGNTDRHSIKKNLIGALLFDSGETAEATRLKRTARRRYTRRKNRICYLQEIFSNEMAKVDDSFFHRLEESFLVEEDKKHERHPIFGNIVDEVAYHEKYPTIYHLRKKLVDSTDKADLRLIYLALAHMIKFRGHFLIEGDLNPDNSDVDKLFIQLVQTYNQLFEENPINASGVDAKAILSARLSKSRRLENLIAQLPGEKKNGLFGNLIALSLGLTPNFKSNFDLAEDAKLQLSKDTYDDDLDNLLAQIGDQYADLFLAAKNLSDAILLSDILRVNTEITKAPLSASMIKRYDEHHQDLTLLKALVRQQLPEKYKEIFFDQSKNGYAGYIDGGASQEEFYKFIKPILEKMDGTEELLVKLNREDLLRKQRTFDNGSIPHQIHLGELHAILRRQEDFYPFLKDNREKIEKILTFRIPYYVGPLARGNSRFAWMTRKSEETITPWNFEEVVDKGASAQSFIERMTNFDKNLPNEKVLPKHSLLYEYFTVYNELTKVKYVTEGMRKPAFLSGEQKKAIVDLLFKTNRKVTVKQLKEDYFKKIECFDSVEISGVEDRFNASLGTYHDLLKIIKDKDFLDNEENEDILEDIVLTLTLFEDREMIEERLKTYAHLFDDKVMKQLKRRRYTGWGRLSRKLINGIRDKQSGKTILDFLKSDGFANRNFMQLIHDDSLTFKEDIQKAQVSGQGDSLHEHIANLAGSPAIKKGILQTVKVVDELVKVMGRHKPENIVIEMARENQTTQKGQKNSRERMKRIEEGIKELGSQILKEHPVENTQLQNEKLYLYYLQNGRDMYVDQELDINRLSDYDVDHIVPQSFLKDDSIDNKVLTRSDKNRGKSDNVPSEEVVKKMKNYWRQLLNAKLITQRKFDNLTKAERGGLSELDKAGFIKRQLVETRQITKHVAQILDSRMNTKYDENDKLIREVKVITLKSKLVSDFRKDFQFYKVREINNYHHAHDAYLNAVVGTALIKKYPKLESEFVYGDYKVYDVRKMIAKSEQEIGKATAKYFFYSNIMNFFKTEITLANGEIRKRPLIETNGETGEIVWDKGRDFATVRKVLSMPQVNIVKKTEVQTGGFSKESILPKRNSDKLIARKKDWDPKKYGGFDSPTVAYSVLVVAKVEKGKSKKLKSVKELLGITIMERSSFEKNPIDFLEAKGYKEVKKDLIIKLPKYSLFELENGRKRMLASAGELQKGNELALPSKYVNFLYLASHYEKLKGSPEDNEQKQLFVEQHKHYLDEIIEQISEFSKRVILADANLDKVLSAYNKHRDKPIREQAENIIHLFTLTNLGAPAAFKYFDTTIDRKRYTSTKEVLDATLIHQSITGLYETRIDLSQLGGDAPKKKRKVGIHGVPAAAGDMRAANLWPSPLMIKRSKKNSLALSLTADQMVSALLDAEPPILYSEYDPTRPFSEASMMGLLTNLADRELVHMINWAKRVPGFVDLTLHDQVHLLECAWLEILMIGLVWRSMEHPVKLLFAPNLLLDRNQGKCVEGMVEIFDMLLATSSRFRMMNLQGEEFVCLKSIILLNSGVYTFLSSTLKSLEEKDHIHRVLDKITDTLIHLMAKAGLTLQQQHQRLAQLLLILSHIRHMSNKGMEHLYSMKCKNVVPLYDLLLEAADAHRLHAPTSRGGASVEETDQSHLATAGSTSSHSLQKYYITGEAEGFPATA

SEQ ID NO: 221 - protein, 2033 aa, Artificial sequence
  #Cas9 variant 2
APKKKRKVGIHGVPAATGAGDMRAANLWPSPLMIKRSKKNSLALSLTADQMVSALLDAEPPILYSEYDPTRPFSEASMMGLLTNLADRELVHMINWAKRVPGFVDLTLHDQVHLLECAWLEILMIGLVWRSMEHPVKLLFAPNLLLDRNQGKCVEGMVEIFDMLLATSSRFRMMNLQGEEFVCLKSIILLNSGVYTFLSSTLKSLEEKDHIHRVLDKITDTLIHLMAKAGLTLQQQHQRLAQLLLILSHIRHMSNKGMEHLYSMKCKNVVPLYDLLLEAADAHRLHAPTSRGGASVEETDQSHLATAGSTSSHSLQKYYITGEAEGFPATASGSEGADKKYSIGLDIGTNSVGWAVITDEYKVPSKKFKVLGNTDRHSIKKNLIGALLFDSGETAEATRLKRTARRRYTRRKNRICYLQEIFSNEMAKVDDSFFHRLEESFLVEEDKKHERHPIFGNIVDEVAYHEKYPTIYHLRKKLVDSTDKADLRLIYLALAHMIKFRGHFLIEGDLNPDNSDVDKLFIQLVQTYNQLFEENPINASGVDAKAILSARLSKSRRLENLIAQLPGEKKNGLFGNLIALSLGLTPNFKSNFDLAEDAKLQLSKDTYDDDLDNLLAQIGDQYADLFLAAKNLSDAILLSDILRVNTEITKAPLSASMIKRYDEHHQDLTLLKALVRQQLPEKYKEIFFDQSKNGYAGYIDGGASQEEFYKFIKPILEKMDGTEELLVKLNREDLLRKQRTFDNGSIPHQIHLGELHAILRRQEDFYPFLKDNREKIEKILTFRIPYYVGPLARGNSRFAWMTRKSEETITPWNFEEVVDKGASAQSFIERMTNFDKNLPNEKVLPKHSLLYEYFTVYNELTKVKYVTEGMRKPAFLSGEQKKAIVDLLFKTNRKVTVKQLKEDYFKKIECFDSVEISGVEDRFNASLGTYHDLLKIIKDKDFLDNEENEDILEDIVLTLTLFEDREMIEERLKTYAHLFDDKVMKQLKRRRYTGWGRLSRKLINGIRDKQSGKTILDFLKSDGFANRNFMQLIHDDSLTFKEDIQKAQVSGQGDSLHEHIANLAGSPAIKKGILQTVKVVDELVKVMGRHKPENIVIEMARENQTTQKGQKNSRERMKRIEEGIKELGSQILKEHPVENTQLQNEKLYLYYLQNGRDMYVDQELDINRLSDYDVDHIVPQSFLKDDSIDNKVLTRSDKNRGKSDNVPSEEVVKKMKNYWRQLLNAKLITQRKFDNLTKAERGGLSELDKAGFIKRQLVETRQITKHVAQILDSRMNTKYDENDKLIREVKVITLKSKLVSDFRKDFQFYKVREINNYHHAHDAYLNAVVGTALIKKYPKLESEFVYGDYKVYDVRKMIAKSEQEIGKATAKYFFYSNIMNFFKTEITLANGEIRKRPLIETNGETGEIVWDKGRDFATVRKVLSMPQVNIVKKTEVQTGGFSKESILPKRNSDKLIARKKDWDPKKYGGFDSPTVAYSVLVVAKVEKGKSKKLKSVKELLGITIMERSSFEKNPIDFLEAKGYKEVKKDLIIKLPKYSLFELENGRKRMLASAGELQKGNELALPSKYVNFLYLASHYEKLKGSPEDNEQKQLFVEQHKHYLDEIIEQISEFSKRVILADANLDKVLSAYNKHRDKPIREQAENIIHLFTLTNLGAPAAFKYFDTTIDRKRYTSTKEVLDATLIHQSITGLYETRIDLSQLGGDAPKKKRKVGIHGVPAAAGDMRAANLWPSPLMIKRSKKNSLALSLTADQMVSALLDAEPPILYSEYDPTRPFSEASMMGLLTNLADRELVHMINWAKRVPGFVDLTLHDQVHLLECAWLEILMIGLVWRSMEHPVKLLFAPNLLLDRNQGKCVEGMVEIFDMLLATSSRFRMMNLQGEEFVCLKSIILLNSGVYTFLSSTLKSLEEKDHIHRVLDKITDTLIHLMAKAGLTLQQQHQRLAQLLLILSHIRHMSNKGMEHLYSMKCKNVVPLYDLLLEAADAHRLHAPTSRGGASVEETDQSHLATAGSTSSHSLQKYYITGEAEGFPATA

SEQ ID NO: 222 - protein, 2035 aa, Artificial sequence
  #Cas9 variant 3
APKKKRKVGIHGVPAATGAGDMRAANLWPSPLMIKRSKKNSLALSLTADQMVSALLDAEPPILYSEYDPTRPFSEASMMGLLTNLADRELVHMINWAKRVPGFVDLTLHDQVHLLECAWLEILMIGLVWRSMEHPVKLLFAPNLLLDRNQGKCVEGMVEIFDMLLATSSRFRMMNLQGEEFVCLKSIILLNSGVYTFLSSTLKSLEEKDHIHRVLDKITDTLIHLMAKAGLTLQQQHQRLAQLLLILSHIRHMSNKGMEHLYSMKCKNVVPLYDLLLEAADAHRLHAPTSRGGASVEETDQSHLATAGSTSSHSLQKYYITGEAEGFPATAGGSGGSGADKKYSIGLDIGTNSVGWAVITDEYKVPSKKFKVLGNTDRHSIKKNLIGALLFDSGETAEATRLKRTARRRYTRRKNRICYLQEIFSNEMAKVDDSFFHRLEESFLVEEDKKHERHPIFGNIVDEVAYHEKYPTIYHLRKKLVDSTDKADLRLIYLALAHMIKFRGHFLIEGDLNPDNSDVDKLFIQLVQTYNQLFEENPINASGVDAKAILSARLSKSRRLENLIAQLPGEKKNGLFGNLIALSLGLTPNFKSNFDLAEDAKLQLSKDTYDDDLDNLLAQIGDQYADLFLAAKNLSDAILLSDILRVNTEITKAPLSASMIKRYDEHHQDLTLLKALVRQQLPEKYKEIFFDQSKNGYAGYIDGGASQEEFYKFIKPILEKMDGTEELLVKLNREDLLRKQRTFDNGSIPHQIHLGELHAILRRQEDFYPFLKDNREKIEKILTFRIPYYVGPLARGNSRFAWMTRKSEETITPWNFEEVVDKGASAQSFIERMTNFDKNLPNEKVLPKHSLLYEYFTVYNELTKVKYVTEGMRKPAFLSGEQKKAIVDLLFKTNRKVTVKQLKEDYFKKIECFDSVEISGVEDRFNASLGTYHDLLKIIKDKDFLDNEENEDILEDIVLTLTLFEDREMIEERLKTYAHLFDDKVMKQLKRRRYTGWGRLSRKLINGIRDKQSGKTILDFLKSDGFANRNFMQLIHDDSLTFKEDIQKAQVSGQGDSLHEHIANLAGSPAIKKGILQTVKVVDELVKVMGRHKPENIVIEMARENQTTQKGQKNSRERMKRIEEGIKELGSQILKEHPVENTQLQNEKLYLYYLQNGRDMYVDQELDINRLSDYDVDHIVPQSFLKDDSIDNKVLTRSDKNRGKSDNVPSEEVVKKMKNYWRQLLNAKLITQRKFDNLTKAERGGLSELDKAGFIKRQLVETRQITKHVAQILDSRMNTKYDENDKLIREVKVITLKSKLVSDFRKDFQFYKVREINNYHHAHDAYLNAVVGTALIKKYPKLESEFVYGDYKVYDVRKMIAKSEQEIGKATAKYFFYSNIMNFFKTEITLANGEIRKRPLIETNGETGEIVWDKGRDFATVRKVLSMPQVNIVKKTEVQTGGFSKESILPKRNSDKLIARKKDWDPKKYGGFDSPTVAYSVLVVAKVEKGKSKKLKSVKELLGITIMERSSFEKNPIDFLEAKGYKEVKKDLIIKLPKYSLFELENGRKRMLASAGELQKGNELALPSKYVNFLYLASHYEKLKGSPEDNEQKQLFVEQHKHYLDEIIEQISEFSKRVILADANLDKVLSAYNKHRDKPIREQAENIIHLFTLTNLGAPAAFKYFDTTIDRKRYTSTKEVLDATLIHQSITGLYETRIDLSQLGGDAPKKKRKVGIHGVPAAAGDMRAANLWPSPLMIKRSKKNSLALSLTADQMVSALLDAEPPILYSEYDPTRPFSEASMMGLLTNLADRELVHMINWAKRVPGFVDLTLHDQVHLLECAWLEILMIGLVWRSMEHPVKLLFAPNLLLDRNQGKCVEGMVEIFDMLLATSSRFRMMNLQGEEFVCLKSIILLNSGVYTFLSSTLKSLEEKDHIHRVLDKITDTLIHLMAKAGLTLQQQHQRLAQLLLILSHIRHMSNKGMEHLYSMKCKNVVPLYDLLLEAADAHRLHAPTSRGGASVEETDQSHLATAGSTSSHSLQKYYITGEAEGFPATA

SEQ ID NO: 223 - protein, 2040 aa, Artificial sequence
  #Cas9 variant 4
APKKKRKVGIHGVPAATGAGDMRAANLWPSPLMIKRSKKNSLALSLTADQMVSALLDAEPPILYSEYDPTRPFSEASMMGLLTNLADRELVHMINWAKRVPGFVDLTLHDQVHLLECAWLEILMIGLVWRSMEHPVKLLFAPNLLLDRNQGKCVEGMVEIFDMLLATSSRFRMMNLQGEEFVCLKSIILLNSGVYTFLSSTLKSLEEKDHIHRVLDKITDTLIHLMAKAGLTLQQQHQRLAQLLLILSHIRHMSNKGMEHLYSMKCKNVVPLYDLLLEAADAHRLHAPTSRGGASVEETDQSHLATAGSTSSHSLQKYYITGEAEGFPATAGTSESATPESGGADKKYSIGLDIGTNSVGWAVITDEYKVPSKKFKVLGNTDRHSIKKNLIGALLFDSGETAEATRLKRTARRRYTRRKNRICYLQEIFSNEMAKVDDSFFHRLEESFLVEEDKKHERHPIFGNIVDEVAYHEKYPTIYHLRKKLVDSTDKADLRLIYLALAHMIKFRGHFLIEGDLNPDNSDVDKLFIQLVQTYNQLFEENPINASGVDAKAILSARLSKSRRLENLIAQLPGEKKNGLFGNLIALSLGLTPNFKSNFDLAEDAKLQLSKDTYDDDLDNLLAQIGDQYADLFLAAKNLSDAILLSDILRVNTEITKAPLSASMIKRYDEHHQDLTLLKALVRQQLPEKYKEIFFDQSKNGYAGYIDGGASQEEFYKFIKPILEKMDGTEELLVKLNREDLLRKQRTFDNGSIPHQIHLGELHAILRRQEDFYPFLKDNREKIEKILTFRIPYYVGPLARGNSRFAWMTRKSEETITPWNFEEVVDKGASAQSFIERMTNFDKNLPNEKVLPKHSLLYEYFTVYNELTKVKYVTEGMRKPAFLSGEQKKAIVDLLFKTNRKVTVKQLKEDYFKKIECFDSVEISGVEDRFNASLGTYHDLLKIIKDKDFLDNEENEDILEDIVLTLTLFEDREMIEERLKTYAHLFDDKVMKQLKRRRYTGWGRLSRKLINGIRDKQSGKTILDFLKSDGFANRNFMQLIHDDSLTFKEDIQKAQVSGQGDSLHEHIANLAGSPAIKKGILQTVKVVDELVKVMGRHKPENIVIEMARENQTTQKGQKNSRERMKRIEEGIKELGSQILKEHPVENTQLQNEKLYLYYLQNGRDMYVDQELDINRLSDYDVDHIVPQSFLKDDSIDNKVLTRSDKNRGKSDNVPSEEVVKKMKNYWRQLLNAKLITQRKFDNLTKAERGGLSELDKAGFIKRQLVETRQITKHVAQILDSRMNTKYDENDKLIREVKVITLKSKLVSDFRKDFQFYKVREINNYHHAHDAYLNAVVGTALIKKYPKLESEFVYGDYKVYDVRKMIAKSEQEIGKATAKYFFYSNIMNFFKTEITLANGEIRKRPLIETNGETGEIVWDKGRDFATVRKVLSMPQVNIVKKTEVQTGGFSKESILPKRNSDKLIARKKDWDPKKYGGFDSPTVAYSVLVVAKVEKGKSKKLKSVKELLGITIMERSSFEKNPIDFLEAKGYKEVKKDLIIKLPKYSLFELENGRKRMLASAGELQKGNELALPSKYVNFLYLASHYEKLKGSPEDNEQKQLFVEQHKHYLDEIIEQISEFSKRVILADANLDKVLSAYNKHRDKPIREQAENIIHLFTLTNLGAPAAFKYFDTTIDRKRYTSTKEVLDATLIHQSITGLYETRIDLSQLGGDAPKKKRKVGIHGVPAAAGDMRAANLWPSPLMIKRSKKNSLALSLTADQMVSALLDAEPPILYSEYDPTRPFSEASMMGLLTNLADRELVHMINWAKRVPGFVDLTLHDQVHLLECAWLEILMIGLVWRSMEHPVKLLFAPNLLLDRNQGKCVEGMVEIFDMLLATSSRFRMMNLQGEEFVCLKSIILLNSGVYTFLSSTLKSLEEKDHIHRVLDKITDTLIHLMAKAGLTLQQQHQRLAQLLLILSHIRHMSNKGMEHLYSMKCKNVVPLYDLLLEAADAHRLHAPTSRGGASVEETDQSHLATAGSTSSHSLQKYYITGEAEGFPATA

SEQ ID NO: 224 - protein, 2037 aa, Artificial sequence
  #Cas9 variant 5
APKKKRKVGIHGVPAATGAGDMRAANLWPSPLMIKRSKKNSLALSLTADQMVSALLDAEPPILYSEYDPTRPFSEASMMGLLTNLADRELVHMINWAKRVPGFVDLTLHDQVHLLECAWLEILMIGLVWRSMEHPVKLLFAPNLLLDRNQGKCVEGMVEIFDMLLATSSRFRMMNLQGEEFVCLKSIILLNSGVYTFLSSTLKSLEEKDHIHRVLDKITDTLIHLMAKAGLTLQQQHQRLAQLLLILSHIRHMSNKGMEHLYSMKCKNVVPLYDLLLEAADAHRLHAPTSRGGASVEETDQSHLATAGSTSSHSLQKYYITGEAEGFPATASGSETPGTGADKKYSIGLDIGTNSVGWAVITDEYKVPSKKFKVLGNTDRHSIKKNLIGALLFDSGETAEATRLKRTARRRYTRRKNRICYLQEIFSNEMAKVDDSFFHRLEESFLVEEDKKHERHPIFGNIVDEVAYHEKYPTIYHLRKKLVDSTDKADLRLIYLALAHMIKFRGHFLIEGDLNPDNSDVDKLFIQLVQTYNQLFEENPINASGVDAKAILSARLSKSRRLENLIAQLPGEKKNGLFGNLIALSLGLTPNFKSNFDLAEDAKLQLSKDTYDDDLDNLLAQIGDQYADLFLAAKNLSDAILLSDILRVNTEITKAPLSASMIKRYDEHHQDLTLLKALVRQQLPEKYKEIFFDQSKNGYAGYIDGGASQEEFYKFIKPILEKMDGTEELLVKLNREDLLRKQRTFDNGSIPHQIHLGELHAILRRQEDFYPFLKDNREKIEKILTFRIPYYVGPLARGNSRFAWMTRKSEETITPWNFEEVVDKGASAQSFIERMTNFDKNLPNEKVLPKHSLLYEYFTVYNELTKVKYVTEGMRKPAFLSGEQKKAIVDLLFKTNRKVTVKQLKEDYFKKIECFDSVEISGVEDRFNASLGTYHDLLKIIKDKDFLDNEENEDILEDIVLTLTLFEDREMIEERLKTYAHLFDDKVMKQLKRRRYTGWGRLSRKLINGIRDKQSGKTILDFLKSDGFANRNFMQLIHDDSLTFKEDIQKAQVSGQGDSLHEHIANLAGSPAIKKGILQTVKVVDELVKVMGRHKPENIVIEMARENQTTQKGQKNSRERMKRIEEGIKELGSQILKEHPVENTQLQNEKLYLYYLQNGRDMYVDQELDINRLSDYDVDHIVPQSFLKDDSIDNKVLTRSDKNRGKSDNVPSEEVVKKMKNYWRQLLNAKLITQRKFDNLTKAERGGLSELDKAGFIKRQLVETRQITKHVAQILDSRMNTKYDENDKLIREVKVITLKSKLVSDFRKDFQFYKVREINNYHHAHDAYLNAVVGTALIKKYPKLESEFVYGDYKVYDVRKMIAKSEQEIGKATAKYFFYSNIMNFFKTEITLANGEIRKRPLIETNGETGEIVWDKGRDFATVRKVLSMPQVNIVKKTEVQTGGFSKESILPKRNSDKLIARKKDWDPKKYGGFDSPTVAYSVLVVAKVEKGKSKKLKSVKELLGITIMERSSFEKNPIDFLEAKGYKEVKKDLIIKLPKYSLFELENGRKRMLASAGELQKGNELALPSKYVNFLYLASHYEKLKGSPEDNEQKQLFVEQHKHYLDEIIEQISEFSKRVILADANLDKVLSAYNKHRDKPIREQAENIIHLFTLTNLGAPAAFKYFDTTIDRKRYTSTKEVLDATLIHQSITGLYETRIDLSQLGGDAPKKKRKVGIHGVPAAAGDMRAANLWPSPLMIKRSKKNSLALSLTADQMVSALLDAEPPILYSEYDPTRPFSEASMMGLLTNLADRELVHMINWAKRVPGFVDLTLHDQVHLLECAWLEILMIGLVWRSMEHPVKLLFAPNLLLDRNQGKCVEGMVEIFDMLLATSSRFRMMNLQGEEFVCLKSIILLNSGVYTFLSSTLKSLEEKDHIHRVLDKITDTLIHLMAKAGLTLQQQHQRLAQLLLILSHIRHMSNKGMEHLYSMKCKNVVPLYDLLLEAADAHRLHAPTSRGGASVEETDQSHLATAGSTSSHSLQKYYITGEAEGFPATA

SEQ ID NO: 225 - protein, 2037 aa, Artificial sequence
  #Cas9 variant 6
APKKKRKVGIHGVPAATGAGDMRAANLWPSPLMIKRSKKNSLALSLTADQMVSALLDAEPPILYSEYDPTRPFSEASMMGLLTNLADRELVHMINWAKRVPGFVDLTLHDQVHLLECAWLEILMIGLVWRSMEHPVKLLFAPNLLLDRNQGKCVEGMVEIFDMLLATSSRFRMMNLQGEEFVCLKSIILLNSGVYTFLSSTLKSLEEKDHIHRVLDKITDTLIHLMAKAGLTLQQQHQRLAQLLLILSHIRHMSNKGMEHLYSMKCKNVVPLYDLLLEAADAHRLHAPTSRGGASVEETDQSHLATAGSTSSHSLQKYYITGEAEGFPATASESATPESGADKKYSIGLDIGTNSVGWAVITDEYKVPSKKFKVLGNTDRHSIKKNLIGALLFDSGETAEATRLKRTARRRYTRRKNRICYLQEIFSNEMAKVDDSFFHRLEESFLVEEDKKHERHPIFGNIVDEVAYHEKYPTIYHLRKKLVDSTDKADLRLIYLALAHMIKFRGHFLIEGDLNPDNSDVDKLFIQLVQTYNQLFEENPINASGVDAKAILSARLSKSRRLENLIAQLPGEKKNGLFGNLIALSLGLTPNFKSNFDLAEDAKLQLSKDTYDDDLDNLLAQIGDQYADLFLAAKNLSDAILLSDILRVNTEITKAPLSASMIKRYDEHHQDLTLLKALVRQQLPEKYKEIFFDQSKNGYAGYIDGGASQEEFYKFIKPILEKMDGTEELLVKLNREDLLRKQRTFDNGSIPHQIHLGELHAILRRQEDFYPFLKDNREKIEKILTFRIPYYVGPLARGNSRFAWMTRKSEETITPWNFEEVVDKGASAQSFIERMTNFDKNLPNEKVLPKHSLLYEYFTVYNELTKVKYVTEGMRKPAFLSGEQKKAIVDLLFKTNRKVTVKQLKEDYFKKIECFDSVEISGVEDRFNASLGTYHDLLKIIKDKDFLDNEENEDILEDIVLTLTLFEDREMIEERLKTYAHLFDDKVMKQLKRRRYTGWGRLSRKLINGIRDKQSGKTILDFLKSDGFANRNFMQLIHDDSLTFKEDIQKAQVSGQGDSLHEHIANLAGSPAIKKGILQTVKVVDELVKVMGRHKPENIVIEMARENQTTQKGQKNSRERMKRIEEGIKELGSQILKEHPVENTQLQNEKLYLYYLQNGRDMYVDQELDINRLSDYDVDHIVPQSFLKDDSIDNKVLTRSDKNRGKSDNVPSEEVVKKMKNYWRQLLNAKLITQRKFDNLTKAERGGLSELDKAGFIKRQLVETRQITKHVAQILDSRMNTKYDENDKLIREVKVITLKSKLVSDFRKDFQFYKVREINNYHHAHDAYLNAVVGTALIKKYPKLESEFVYGDYKVYDVRKMIAKSEQEIGKATAKYFFYSNIMNFFKTEITLANGEIRKRPLIETNGETGEIVWDKGRDFATVRKVLSMPQVNIVKKTEVQTGGFSKESILPKRNSDKLIARKKDWDPKKYGGFDSPTVAYSVLVVAKVEKGKSKKLKSVKELLGITIMERSSFEKNPIDFLEAKGYKEVKKDLIIKLPKYSLFELENGRKRMLASAGELQKGNELALPSKYVNFLYLASHYEKLKGSPEDNEQKQLFVEQHKHYLDEIIEQISEFSKRVILADANLDKVLSAYNKHRDKPIREQAENIIHLFTLTNLGAPAAFKYFDTTIDRKRYTSTKEVLDATLIHQSITGLYETRIDLSQLGGDAPKKKRKVGIHGVPAAAGDMRAANLWPSPLMIKRSKKNSLALSLTADQMVSALLDAEPPILYSEYDPTRPFSEASMMGLLTNLADRELVHMINWAKRVPGFVDLTLHDQVHLLECAWLEILMIGLVWRSMEHPVKLLFAPNLLLDRNQGKCVEGMVEIFDMLLATSSRFRMMNLQGEEFVCLKSIILLNSGVYTFLSSTLKSLEEKDHIHRVLDKITDTLIHLMAKAGLTLQQQHQRLAQLLLILSHIRHMSNKGMEHLYSMKCKNVVPLYDLLLEAADAHRLHAPTSRGGASVEETDQSHLATAGSTSSHSLQKYYITGEAEGFPATA

SEQ ID NO: 226 - protein, 2040 aa, Artificial sequence
  #Cas9 variant 7
APKKKRKVGIHGVPAATGGGSAGDMRAANLWPSPLMIKRSKKNSLALSLTADQMVSALLDAEPPILYSEYDPTRPFSEASMMGLLTNLADRELVHMINWAKRVPGFVDLTLHDQVHLLECAWLEILMIGLVWRSMEHPVKLLFAPNLLLDRNQGKCVEGMVEIFDMLLATSSRFRMMNLQGEEFVCLKSIILLNSGVYTFLSSTLKSLEEKDHIHRVLDKITDTLIHLMAKAGLTLQQQHQRLAQLLLILSHIRHMSNKGMEHLYSMKCKNVVPLYDLLLEAADAHRLHAPTSRGGASVEETDQSHLATAGSTSSHSLQKYYITGEAEGFPATASGSETPGTGADKKYSIGLDIGTNSVGWAVITDEYKVPSKKFKVLGNTDRHSIKKNLIGALLFDSGETAEATRLKRTARRRYTRRKNRICYLQEIFSNEMAKVDDSFFHRLEESFLVEEDKKHERHPIFGNIVDEVAYHEKYPTIYHLRKKLVDSTDKADLRLIYLALAHMIKFRGHFLIEGDLNPDNSDVDKLFIQLVQTYNQLFEENPINASGVDAKAILSARLSKSRRLENLIAQLPGEKKNGLFGNLIALSLGLTPNFKSNFDLAEDAKLQLSKDTYDDDLDNLLAQIGDQYADLFLAAKNLSDAILLSDILRVNTEITKAPLSASMIKRYDEHHQDLTLLKALVRQQLPEKYKEIFFDQSKNGYAGYIDGGASQEEFYKFIKPILEKMDGTEELLVKLNREDLLRKQRTFDNGSIPHQIHLGELHAILRRQEDFYPFLKDNREKIEKILTFRIPYYVGPLARGNSRFAWMTRKSEETITPWNFEEVVDKGASAQSFIERMTNFDKNLPNEKVLPKHSLLYEYFTVYNELTKVKYVTEGMRKPAFLSGEQKKAIVDLLFKTNRKVTVKQLKEDYFKKIECFDSVEISGVEDRFNASLGTYHDLLKIIKDKDFLDNEENEDILEDIVLTLTLFEDREMIEERLKTYAHLFDDKVMKQLKRRRYTGWGRLSRKLINGIRDKQSGKTILDFLKSDGFANRNFMQLIHDDSLTFKEDIQKAQVSGQGDSLHEHIANLAGSPAIKKGILQTVKVVDELVKVMGRHKPENIVIEMARENQTTQKGQKNSRERMKRIEEGIKELGSQILKEHPVENTQLQNEKLYLYYLQNGRDMYVDQELDINRLSDYDVDHIVPQSFLKDDSIDNKVLTRSDKNRGKSDNVPSEEVVKKMKNYWRQLLNAKLITQRKFDNLTKAERGGLSELDKAGFIKRQLVETRQITKHVAQILDSRMNTKYDENDKLIREVKVITLKSKLVSDFRKDFQFYKVREINNYHHAHDAYLNAVVGTALIKKYPKLESEFVYGDYKVYDVRKMIAKSEQEIGKATAKYFFYSNIMNFFKTEITLANGEIRKRPLIETNGETGEIVWDKGRDFATVRKVLSMPQVNIVKKTEVQTGGFSKESILPKRNSDKLIARKKDWDPKKYGGFDSPTVAYSVLVVAKVEKGKSKKLKSVKELLGITIMERSSFEKNPIDFLEAKGYKEVKKDLIIKLPKYSLFELENGRKRMLASAGELQKGNELALPSKYVNFLYLASHYEKLKGSPEDNEQKQLFVEQHKHYLDEIIEQISEFSKRVILADANLDKVLSAYNKHRDKPIREQAENIIHLFTLTNLGAPAAFKYFDTTIDRKRYTSTKEVLDATLIHQSITGLYETRIDLSQLGGDAPKKKRKVGIHGVPAAAGDMRAANLWPSPLMIKRSKKNSLALSLTADQMVSALLDAEPPILYSEYDPTRPFSEASMMGLLTNLADRELVHMINWAKRVPGFVDLTLHDQVHLLECAWLEILMIGLVWRSMEHPVKLLFAPNLLLDRNQGKCVEGMVEIFDMLLATSSRFRMMNLQGEEFVCLKSIILLNSGVYTFLSSTLKSLEEKDHIHRVLDKITDTLIHLMAKAGLTLQQQHQRLAQLLLILSHIRHMSNKGMEHLYSMKCKNVVPLYDLLLEAADAHRLHAPTSRGGASVEETDQSHLATAGSTSSHSLQKYYITGEAEGFPATA

SEQ ID NO: 227 - protein, 2042 aa, Artificial sequence
  #Cas9 variant 8
APKKKRKVGIHGVPAATGGGSAGDMRAANLWPSPLMIKRSKKNSLALSLTADQMVSALLDAEPPILYSEYDPTRPFSEASMMGLLTNLADRELVHMINWAKRVPGFVDLTLHDQVHLLECAWLEILMIGLVWRSMEHPVKLLFAPNLLLDRNQGKCVEGMVEIFDMLLATSSRFRMMNLQGEEFVCLKSIILLNSGVYTFLSSTLKSLEEKDHIHRVLDKITDTLIHLMAKAGLTLQQQHQRLAQLLLILSHIRHMSNKGMEHLYSMKCKNVVPLYDLLLEAADAHRLHAPTSRGGASVEETDQSHLATAGSTSSHSLQKYYITGEAEGFPATASGSETPGTPGGADKKYSIGLDIGTNSVGWAVITDEYKVPSKKFKVLGNTDRHSIKKNLIGALLFDSGETAEATRLKRTARRRYTRRKNRICYLQEIFSNEMAKVDDSFFHRLEESFLVEEDKKHERHPIFGNIVDEVAYHEKYPTIYHLRKKLVDSTDKADLRLIYLALAHMIKFRGHFLIEGDLNPDNSDVDKLFIQLVQTYNQLFEENPINASGVDAKAILSARLSKSRRLENLIAQLPGEKKNGLFGNLIALSLGLTPNFKSNFDLAEDAKLQLSKDTYDDDLDNLLAQIGDQYADLFLAAKNLSDAILLSDILRVNTEITKAPLSASMIKRYDEHHQDLTLLKALVRQQLPEKYKEIFFDQSKNGYAGYIDGGASQEEFYKFIKPILEKMDGTEELLVKLNREDLLRKQRTFDNGSIPHQIHLGELHAILRRQEDFYPFLKDNREKIEKILTFRIPYYVGPLARGNSRFAWMTRKSEETITPWNFEEVVDKGASAQSFIERMTNFDKNLPNEKVLPKHSLLYEYFTVYNELTKVKYVTEGMRKPAFLSGEQKKAIVDLLFKTNRKVTVKQLKEDYFKKIECFDSVEISGVEDRFNASLGTYHDLLKIIKDKDFLDNEENEDILEDIVLTLTLFEDREMIEERLKTYAHLFDDKVMKQLKRRRYTGWGRLSRKLINGIRDKQSGKTILDFLKSDGFANRNFMQLIHDDSLTFKEDIQKAQVSGQGDSLHEHIANLAGSPAIKKGILQTVKVVDELVKVMGRHKPENIVIEMARENQTTQKGQKNSRERMKRIEEGIKELGSQILKEHPVENTQLQNEKLYLYYLQNGRDMYVDQELDINRLSDYDVDHIVPQSFLKDDSIDNKVLTRSDKNRGKSDNVPSEEVVKKMKNYWRQLLNAKLITQRKFDNLTKAERGGLSELDKAGFIKRQLVETRQITKHVAQILDSRMNTKYDENDKLIREVKVITLKSKLVSDFRKDFQFYKVREINNYHHAHDAYLNAVVGTALIKKYPKLESEFVYGDYKVYDVRKMIAKSEQEIGKATAKYFFYSNIMNFFKTEITLANGEIRKRPLIETNGETGEIVWDKGRDFATVRKVLSMPQVNIVKKTEVQTGGFSKESILPKRNSDKLIARKKDWDPKKYGGFDSPTVAYSVLVVAKVEKGKSKKLKSVKELLGITIMERSSFEKNPIDFLEAKGYKEVKKDLIIKLPKYSLFELENGRKRMLASAGELQKGNELALPSKYVNFLYLASHYEKLKGSPEDNEQKQLFVEQHKHYLDEIIEQISEFSKRVILADANLDKVLSAYNKHRDKPIREQAENIIHLFTLTNLGAPAAFKYFDTTIDRKRYTSTKEVLDATLIHQSITGLYETRIDLSQLGGDAPKKKRKVGIHGVPAAAGDMRAANLWPSPLMIKRSKKNSLALSLTADQMVSALLDAEPPILYSEYDPTRPFSEASMMGLLTNLADRELVHMINWAKRVPGFVDLTLHDQVHLLECAWLEILMIGLVWRSMEHPVKLLFAPNLLLDRNQGKCVEGMVEIFDMLLATSSRFRMMNLQGEEFVCLKSIILLNSGVYTFLSSTLKSLEEKDHIHRVLDKITDTLIHLMAKAGLTLQQQHQRLAQLLLILSHIRHMSNKGMEHLYSMKCKNVVPLYDLLLEAADAHRLHAPTSRGGASVEETDQSHLATAGSTSSHSLQKYYITGEAEGFPATA

SEQ ID NO: 228 - protein, 2036 aa, Artificial sequence
  #Cas9 variant 9
APKKKRKVGIHGVPAATGAGDMRAANLWPSPLMIKRSKKNSLALSLTADQMVSALLDAEPPILYSEYDPTRPFSEASMMGLLTNLADRELVHMINWAKRVPGFVDLTLHDQVHLLECAWLEILMIGLVWRSMEHPVKLLFAPNLLLDRNQGKCVEGMVEIFDMLLATSSRFRMMNLQGEEFVCLKSIILLNSGVYTFLSSTLKSLEEKDHIHRVLDKITDTLIHLMAKAGLTLQQQHQRLAQLLLILSHIRHMSNKGMEHLYSMKCKNVVPLYDLLLEAADAHRLHAPTSRGGASVEETDQSHLATAGSTSSHSLQKYYITGEAEGFPATAGASGSKTPGDKKYSIGLDIGTNSVGWAVITDEYKVPSKKFKVLGNTDRHSIKKNLIGALLFDSGETAEATRLKRTARRRYTRRKNRICYLQEIFSNEMAKVDDSFFHRLEESFLVEEDKKHERHPIFGNIVDEVAYHEKYPTIYHLRKKLVDSTDKADLRLIYLALAHMIKFRGHFLIEGDLNPDNSDVDKLFIQLVQTYNQLFEENPINASGVDAKAILSARLSKSRRLENLIAQLPGEKKNGLFGNLIALSLGLTPNFKSNFDLAEDAKLQLSKDTYDDDLDNLLAQIGDQYADLFLAAKNLSDAILLSDILRVNTEITKAPLSASMIKRYDEHHQDLTLLKALVRQQLPEKYKEIFFDQSKNGYAGYIDGGASQEEFYKFIKPILEKMDGTEELLVKLNREDLLRKQRTFDNGSIPHQIHLGELHAILRRQEDFYPFLKDNREKIEKILTFRIPYYVGPLARGNSRFAWMTRKSEETITPWNFEEVVDKGASAQSFIERMTNFDKNLPNEKVLPKHSLLYEYFTVYNELTKVKYVTEGMRKPAFLSGEQKKAIVDLLFKTNRKVTVKQLKEDYFKKIECFDSVEISGVEDRFNASLGTYHDLLKIIKDKDFLDNEENEDILEDIVLTLTLFEDREMIEERLKTYAHLFDDKVMKQLKRRRYTGWGRLSRKLINGIRDKQSGKTILDFLKSDGFANRNFMQLIHDDSLTFKEDIQKAQVSGQGDSLHEHIANLAGSPAIKKGILQTVKVVDELVKVMGRHKPENIVIEMARENQTTQKGQKNSRERMKRIEEGIKELGSQILKEHPVENTQLQNEKLYLYYLQNGRDMYVDQELDINRLSDYDVDHIVPQSFLKDDSIDNKVLTRSDKNRGKSDNVPSEEVVKKMKNYWRQLLNAKLITQRKFDNLTKAERGGLSELDKAGFIKRQLVETRQITKHVAQILDSRMNTKYDENDKLIREVKVITLKSKLVSDFRKDFQFYKVREINNYHHAHDAYLNAVVGTALIKKYPKLESEFVYGDYKVYDVRKMIAKSEQEIGKATAKYFFYSNIMNFFKTEITLANGEIRKRPLIETNGETGEIVWDKGRDFATVRKVLSMPQVNIVKKTEVQTGGFSKESILPKRNSDKLIARKKDWDPKKYGGFDSPTVAYSVLVVAKVEKGKSKKLKSVKELLGITIMERSSFEKNPIDFLEAKGYKEVKKDLIIKLPKYSLFELENGRKRMLASAGELQKGNELALPSKYVNFLYLASHYEKLKGSPEDNEQKQLFVEQHKHYLDEIIEQISEFSKRVILADANLDKVLSAYNKHRDKPIREQAENIIHLFTLTNLGAPAAFKYFDTTIDRKRYTSTKEVLDATLIHQSITGLYETRIDLSQLGGDAPKKKRKVGIHGVPAAAGDMRAANLWPSPLMIKRSKKNSLALSLTADQMVSALLDAEPPILYSEYDPTRPFSEASMMGLLTNLADRELVHMINWAKRVPGFVDLTLHDQVHLLECAWLEILMIGLVWRSMEHPVKLLFAPNLLLDRNQGKCVEGMVEIFDMLLATSSRFRMMNLQGEEFVCLKSIILLNSGVYTFLSSTLKSLEEKDHIHRVLDKITDTLIHLMAKAGLTLQQQHQRLAQLLLILSHIRHMSNKGMEHLYSMKCKNVVPLYDLLLEAADAHRLHAPTSRGGASVEETDQSHLATAGSTSSHSLQKYYITGEAEGFPATA

SEQ ID NO: 229 - protein, 2033 aa, Artificial sequence
  #Cas9 variant 10
APKKKRKVGIHGVPAATGAGDMRAANLWPSPLMIKRSKKNSLALSLTADQMVSALLDAEPPILYSEYDPTRPFSEASMMGLLTNLADRELVHMINWAKRVPGFVDLTLHDQVHLLECAWLEILMIGLVWRSMEHPVKLLFAPNLLLDRNQGKCVEGMVEIFDMLLATSSRFRMMNLQGEEFVCLKSIILLNSGVYTFLSSTLKSLEEKDHIHRVLDKITDTLIHLMAKAGLTLQQQHQRLAQLLLILSHIRHMSNKGMEHLYSMKCKNVVPLYDLLLEAADAHRLHAPTSRGGASVEETDQSHLATAGSTSSHSLQKYYITGEAEGFPATATPESGADKKYSIGLDIGTNSVGWAVITDEYKVPSKKFKVLGNTDRHSIKKNLIGALLFDSGETAEATRLKRTARRRYTRRKNRICYLQEIFSNEMAKVDDSFFHRLEESFLVEEDKKHERHPIFGNIVDEVAYHEKYPTIYHLRKKLVDSTDKADLRLIYLALAHMIKFRGHFLIEGDLNPDNSDVDKLFIQLVQTYNQLFEENPINASGVDAKAILSARLSKSRRLENLIAQLPGEKKNGLFGNLIALSLGLTPNFKSNFDLAEDAKLQLSKDTYDDDLDNLLAQIGDQYADLFLAAKNLSDAILLSDILRVNTEITKAPLSASMIKRYDEHHQDLTLLKALVRQQLPEKYKEIFFDQSKNGYAGYIDGGASQEEFYKFIKPILEKMDGTEELLVKLNREDLLRKQRTFDNGSIPHQIHLGELHAILRRQEDFYPFLKDNREKIEKILTFRIPYYVGPLARGNSRFAWMTRKSEETITPWNFEEVVDKGASAQSFIERMTNFDKNLPNEKVLPKHSLLYEYFTVYNELTKVKYVTEGMRKPAFLSGEQKKAIVDLLFKTNRKVTVKQLKEDYFKKIECFDSVEISGVEDRFNASLGTYHDLLKIIKDKDFLDNEENEDILEDIVLTLTLFEDREMIEERLKTYAHLFDDKVMKQLKRRRYTGWGRLSRKLINGIRDKQSGKTILDFLKSDGFANRNFMQLIHDDSLTFKEDIQKAQVSGQGDSLHEHIANLAGSPAIKKGILQTVKVVDELVKVMGRHKPENIVIEMARENQTTQKGQKNSRERMKRIEEGIKELGSQILKEHPVENTQLQNEKLYLYYLQNGRDMYVDQELDINRLSDYDVDHIVPQSFLKDDSIDNKVLTRSDKNRGKSDNVPSEEVVKKMKNYWRQLLNAKLITQRKFDNLTKAERGGLSELDKAGFIKRQLVETRQITKHVAQILDSRMNTKYDENDKLIREVKVITLKSKLVSDFRKDFQFYKVREINNYHHAHDAYLNAVVGTALIKKYPKLESEFVYGDYKVYDVRKMIAKSEQEIGKATAKYFFYSNIMNFFKTEITLANGEIRKRPLIETNGETGEIVWDKGRDFATVRKVLSMPQVNIVKKTEVQTGGFSKESILPKRNSDKLIARKKDWDPKKYGGFDSPTVAYSVLVVAKVEKGKSKKLKSVKELLGITIMERSSFEKNPIDFLEAKGYKEVKKDLIIKLPKYSLFELENGRKRMLASAGELQKGNELALPSKYVNFLYLASHYEKLKGSPEDNEQKQLFVEQHKHYLDEIIEQISEFSKRVILADANLDKVLSAYNKHRDKPIREQAENIIHLFTLTNLGAPAAFKYFDTTIDRKRYTSTKEVLDATLIHQSITGLYETRIDLSQLGGDAPKKKRKVGIHGVPAAAGDMRAANLWPSPLMIKRSKKNSLALSLTADQMVSALLDAEPPILYSEYDPTRPFSEASMMGLLTNLADRELVHMINWAKRVPGFVDLTLHDQVHLLECAWLEILMIGLVWRSMEHPVKLLFAPNLLLDRNQGKCVEGMVEIFDMLLATSSRFRMMNLQGEEFVCLKSIILLNSGVYTFLSSTLKSLEEKDHIHRVLDKITDTLIHLMAKAGLTLQQQHQRLAQLLLILSHIRHMSNKGMEHLYSMKCKNVVPLYDLLLEAADAHRLHAPTSRGGASVEETDQSHLATAGSTSSHSLQKYYITGEAEGFPATA

SEQ ID NO: 230 - protein, 2033 aa, Artificial sequence
  #Cas9 variant 11
APKKKRKVGIHGVPAATGPGGSAGDMRAANLWPSPLMIKRSKKNSLALSLTADQMVSALLDAEPPILYSEYDPTRPFSEASMMGLLTNLADRELVHMINWAKRVPGFVDLTLHDQVHLLECAWLEILMIGLVWRSMEHPVKLLFAPNLLLDRNQGKCVEGMVEIFDMLLATSSRFRMMNLQGEEFVCLKSIILLNSGVYTFLSSTLKSLEEKDHIHRVLDKITDTLIHLMAKAGLTLQQQHQRLAQLLLILSHIRHMSNKGMEHLYSMKCKNVVPLYDLLLEAADAHRLHAPTSRGGASVEETDQSHLATAGSTSSHSLQKYYITGEAEGFPATAGADKKYSIGLDIGTNSVGWAVITDEYKVPSKKFKVLGNTDRHSIKKNLIGALLFDSGETAEATRLKRTARRRYTRRKNRICYLQEIFSNEMAKVDDSFFHRLEESFLVEEDKKHERHPIFGNIVDEVAYHEKYPTIYHLRKKLVDSTDKADLRLIYLALAHMIKFRGHFLIEGDLNPDNSDVDKLFIQLVQTYNQLFEENPINASGVDAKAILSARLSKSRRLENLIAQLPGEKKNGLFGNLIALSLGLTPNFKSNFDLAEDAKLQLSKDTYDDDLDNLLAQIGDQYADLFLAAKNLSDAILLSDILRVNTEITKAPLSASMIKRYDEHHQDLTLLKALVRQQLPEKYKEIFFDQSKNGYAGYIDGGASQEEFYKFIKPILEKMDGTEELLVKLNREDLLRKQRTFDNGSIPHQIHLGELHAILRRQEDFYPFLKDNREKIEKILTFRIPYYVGPLARGNSRFAWMTRKSEETITPWNFEEVVDKGASAQSFIERMTNFDKNLPNEKVLPKHSLLYEYFTVYNELTKVKYVTEGMRKPAFLSGEQKKAIVDLLFKTNRKVTVKQLKEDYFKKIECFDSVEISGVEDRFNASLGTYHDLLKIIKDKDFLDNEENEDILEDIVLTLTLFEDREMIEERLKTYAHLFDDKVMKQLKRRRYTGWGRLSRKLINGIRDKQSGKTILDFLKSDGFANRNFMQLIHDDSLTFKEDIQKAQVSGQGDSLHEHIANLAGSPAIKKGILQTVKVVDELVKVMGRHKPENIVIEMARENQTTQKGQKNSRERMKRIEEGIKELGSQILKEHPVENTQLQNEKLYLYYLQNGRDMYVDQELDINRLSDYDVDHIVPQSFLKDDSIDNKVLTRSDKNRGKSDNVPSEEVVKKMKNYWRQLLNAKLITQRKFDNLTKAERGGLSELDKAGFIKRQLVETRQITKHVAQILDSRMNTKYDENDKLIREVKVITLKSKLVSDFRKDFQFYKVREINNYHHAHDAYLNAVVGTALIKKYPKLESEFVYGDYKVYDVRKMIAKSEQEIGKATAKYFFYSNIMNFFKTEITLANGEIRKRPLIETNGETGEIVWDKGRDFATVRKVLSMPQVNIVKKTEVQTGGFSKESILPKRNSDKLIARKKDWDPKKYGGFDSPTVAYSVLVVAKVEKGKSKKLKSVKELLGITIMERSSFEKNPIDFLEAKGYKEVKKDLIIKLPKYSLFELENGRKRMLASAGELQKGNELALPSKYVNFLYLASHYEKLKGSPEDNEQKQLFVEQHKHYLDEIIEQISEFSKRVILADANLDKVLSAYNKHRDKPIREQAENIIHLFTLTNLGAPAAFKYFDTTIDRKRYTSTKEVLDATLIHQSITGLYETRIDLSQLGGDAPKKKRKVGIHGVPAAAGDMRAANLWPSPLMIKRSKKNSLALSLTADQMVSALLDAEPPILYSEYDPTRPFSEASMMGLLTNLADRELVHMINWAKRVPGFVDLTLHDQVHLLECAWLEILMIGLVWRSMEHPVKLLFAPNLLLDRNQGKCVEGMVEIFDMLLATSSRFRMMNLQGEEFVCLKSIILLNSGVYTFLSSTLKSLEEKDHIHRVLDKITDTLIHLMAKAGLTLQQQHQRLAQLLLILSHIRHMSNKGMEHLYSMKCKNVVPLYDLLLEAADAHRLHAPTSRGGASVEETDQSHLATAGSTSSHSLQKYYITGEAEGFPATA

SEQ ID NO: 231 - protein, 2042 aa, Artificial sequence
  #Cas9 variant 12
APKKKRKVGIHGVPAATGGGSAGDMRAANLWPSPLMIKRSKKNSLALSLTADQMVSALLDAEPPILYSEYDPTRPFSEASMMGLLTNLADRELVHMINWAKRVPGFVDLTLHDQVHLLECAWLEILMIGLVWRSMEHPVKLLFAPNLLLDRNQGKCVEGMVEIFDMLLATSSRFRMMNLQGEEFVCLKSIILLNSGVYTFLSSTLKSLEEKDHIHRVLDKITDTLIHLMAKAGLTLQQQHQRLAQLLLILSHIRHMSNKGMEHLYSMKCKNVVPLYDLLLEAADAHRLHAPTSRGGASVEETDQSHLATAGSTSSHSLQKYYITGEAEGFPATASGSETPGTSEGADKKYSIGLDIGTNSVGWAVITDEYKVPSKKFKVLGNTDRHSIKKNLIGALLFDSGETAEATRLKRTARRRYTRRKNRICYLQEIFSNEMAKVDDSFFHRLEESFLVEEDKKHERHPIFGNIVDEVAYHEKYPTIYHLRKKLVDSTDKADLRLIYLALAHMIKFRGHFLIEGDLNPDNSDVDKLFIQLVQTYNQLFEENPINASGVDAKAILSARLSKSRRLENLIAQLPGEKKNGLFGNLIALSLGLTPNFKSNFDLAEDAKLQLSKDTYDDDLDNLLAQIGDQYADLFLAAKNLSDAILLSDILRVNTEITKAPLSASMIKRYDEHHQDLTLLKALVRQQLPEKYKEIFFDQSKNGYAGYIDGGASQEEFYKFIKPILEKMDGTEELLVKLNREDLLRKQRTFDNGSIPHQIHLGELHAILRRQEDFYPFLKDNREKIEKILTFRIPYYVGPLARGNSRFAWMTRKSEETITPWNFEEVVDKGASAQSFIERMTNFDKNLPNEKVLPKHSLLYEYFTVYNELTKVKYVTEGMRKPAFLSGEQKKAIVDLLFKTNRKVTVKQLKEDYFKKIECFDSVEISGVEDRFNASLGTYHDLLKIIKDKDFLDNEENEDILEDIVLTLTLFEDREMIEERLKTYAHLFDDKVMKQLKRRRYTGWGRLSRKLINGIRDKQSGKTILDFLKSDGFANRNFMQLIHDDSLTFKEDIQKAQVSGQGDSLHEHIANLAGSPAIKKGILQTVKVVDELVKVMGRHKPENIVIEMARENQTTQKGQKNSRERMKRIEEGIKELGSQILKEHPVENTQLQNEKLYLYYLQNGRDMYVDQELDINRLSDYDVDHIVPQSFLKDDSIDNKVLTRSDKNRGKSDNVPSEEVVKKMKNYWRQLLNAKLITQRKFDNLTKAERGGLSELDKAGFIKRQLVETRQITKHVAQILDSRMNTKYDENDKLIREVKVITLKSKLVSDFRKDFQFYKVREINNYHHAHDAYLNAVVGTALIKKYPKLESEFVYGDYKVYDVRKMIAKSEQEIGKATAKYFFYSNIMNFFKTEITLANGEIRKRPLIETNGETGEIVWDKGRDFATVRKVLSMPQVNIVKKTEVQTGGFSKESILPKRNSDKLIARKKDWDPKKYGGFDSPTVAYSVLVVAKVEKGKSKKLKSVKELLGITIMERSSFEKNPIDFLEAKGYKEVKKDLIIKLPKYSLFELENGRKRMLASAGELQKGNELALPSKYVNFLYLASHYEKLKGSPEDNEQKQLFVEQHKHYLDEIIEQISEFSKRVILADANLDKVLSAYNKHRDKPIREQAENIIHLFTLTNLGAPAAFKYFDTTIDRKRYTSTKEVLDATLIHQSITGLYETRIDLSQLGGDAPKKKRKVGIHGVPAAAGDMRAANLWPSPLMIKRSKKNSLALSLTADQMVSALLDAEPPILYSEYDPTRPFSEASMMGLLTNLADRELVHMINWAKRVPGFVDLTLHDQVHLLECAWLEILMIGLVWRSMEHPVKLLFAPNLLLDRNQGKCVEGMVEIFDMLLATSSRFRMMNLQGEEFVCLKSIILLNSGVYTFLSSTLKSLEEKDHIHRVLDKITDTLIHLMAKAGLTLQQQHQRLAQLLLILSHIRHMSNKGMEHLYSMKCKNVVPLYDLLLEAADAHRLHAPTSRGGASVEETDQSHLATAGSTSSHSLQKYYITGEAEGFPATA

SEQ ID NO: 232 - protein, 2036 aa, Artificial sequence
  #Cas9 variant 13
APKKKRKVGIHGVPAATGGGSAGDMRAANLWPSPLMIKRSKKNSLALSLTADQMVSALLDAEPPILYSEYDPTRPFSEASMMGLLTNLADRELVHMINWAKRVPGFVDLTLHDQVHLLECAWLEILMIGLVWRSMEHPVKLLFAPNLLLDRNQGKCVEGMVEIFDMLLATSSRFRMMNLQGEEFVCLKSIILLNSGVYTFLSSTLKSLEEKDHIHRVLDKITDTLIHLMAKAGLTLQQQHQRLAQLLLILSHIRHMSNKGMEHLYSMKCKNVVPLYDLLLEAADAHRLHAPTSRGGASVEETDQSHLATAGSTSSHSLQKYYITGEAEGFPATATPESGADKKYSIGLDIGTNSVGWAVITDEYKVPSKKFKVLGNTDRHSIKKNLIGALLFDSGETAEATRLKRTARRRYTRRKNRICYLQEIFSNEMAKVDDSFFHRLEESFLVEEDKKHERHPIFGNIVDEVAYHEKYPTIYHLRKKLVDSTDKADLRLIYLALAHMIKFRGHFLIEGDLNPDNSDVDKLFIQLVQTYNQLFEENPINASGVDAKAILSARLSKSRRLENLIAQLPGEKKNGLFGNLIALSLGLTPNFKSNFDLAEDAKLQLSKDTYDDDLDNLLAQIGDQYADLFLAAKNLSDAILLSDILRVNTEITKAPLSASMIKRYDEHHQDLTLLKALVRQQLPEKYKEIFFDQSKNGYAGYIDGGASQEEFYKFIKPILEKMDGTEELLVKLNREDLLRKQRTFDNGSIPHQIHLGELHAILRRQEDFYPFLKDNREKIEKILTFRIPYYVGPLARGNSRFAWMTRKSEETITPWNFEEVVDKGASAQSFIERMTNFDKNLPNEKVLPKHSLLYEYFTVYNELTKVKYVTEGMRKPAFLSGEQKKAIVDLLFKTNRKVTVKQLKEDYFKKIECFDSVEISGVEDRFNASLGTYHDLLKIIKDKDFLDNEENEDILEDIVLTLTLFEDREMIEERLKTYAHLFDDKVMKQLKRRRYTGWGRLSRKLINGIRDKQSGKTILDFLKSDGFANRNFMQLIHDDSLTFKEDIQKAQVSGQGDSLHEHIANLAGSPAIKKGILQTVKVVDELVKVMGRHKPENIVIEMARENQTTQKGQKNSRERMKRIEEGIKELGSQILKEHPVENTQLQNEKLYLYYLQNGRDMYVDQELDINRLSDYDVDHIVPQSFLKDDSIDNKVLTRSDKNRGKSDNVPSEEVVKKMKNYWRQLLNAKLITQRKFDNLTKAERGGLSELDKAGFIKRQLVETRQITKHVAQILDSRMNTKYDENDKLIREVKVITLKSKLVSDFRKDFQFYKVREINNYHHAHDAYLNAVVGTALIKKYPKLESEFVYGDYKVYDVRKMIAKSEQEIGKATAKYFFYSNIMNFFKTEITLANGEIRKRPLIETNGETGEIVWDKGRDFATVRKVLSMPQVNIVKKTEVQTGGFSKESILPKRNSDKLIARKKDWDPKKYGGFDSPTVAYSVLVVAKVEKGKSKKLKSVKELLGITIMERSSFEKNPIDFLEAKGYKEVKKDLIIKLPKYSLFELENGRKRMLASAGELQKGNELALPSKYVNFLYLASHYEKLKGSPEDNEQKQLFVEQHKHYLDEIIEQISEFSKRVILADANLDKVLSAYNKHRDKPIREQAENIIHLFTLTNLGAPAAFKYFDTTIDRKRYTSTKEVLDATLIHQSITGLYETRIDLSQLGGDAPKKKRKVGIHGVPAAAGDMRAANLWPSPLMIKRSKKNSLALSLTADQMVSALLDAEPPILYSEYDPTRPFSEASMMGLLTNLADRELVHMINWAKRVPGFVDLTLHDQVHLLECAWLEILMIGLVWRSMEHPVKLLFAPNLLLDRNQGKCVEGMVEIFDMLLATSSRFRMMNLQGEEFVCLKSIILLNSGVYTFLSSTLKSLEEKDHIHRVLDKITDTLIHLMAKAGLTLQQQHQRLAQLLLILSHIRHMSNKGMEHLYSMKCKNVVPLYDLLLEAADAHRLHAPTSRGGASVEETDQSHLATAGSTSSHSLQKYYITGEAEGFPATA

SEQ ID NO: 233 - protein, 2043 aa, Artificial sequence
  #Cas9 variant 14
APKKKRKVGIHGVPAATGPGGSAGDTTGPGGSAGDMRAANLWPSPLMIKRSKKNSLALSLTADQMVSALLDAEPPILYSEYDPTRPFSEASMMGLLTNLADRELVHMINWAKRVPGFVDLTLHDQVHLLECAWLEILMIGLVWRSMEHPVKLLFAPNLLLDRNQGKCVEGMVEIFDMLLATSSRFRMMNLQGEEFVCLKSIILLNSGVYTFLSSTLKSLEEKDHIHRVLDKITDTLIHLMAKAGLTLQQQHQRLAQLLLILSHIRHMSNKGMEHLYSMKCKNVVPLYDLLLEAADAHRLHAPTSRGGASVEETDQSHLATAGSTSSHSLQKYYITGEAEGFPATAGADKKYSIGLDIGTNSVGWAVITDEYKVPSKKFKVLGNTDRHSIKKNLIGALLFDSGETAEATRLKRTARRRYTRRKNRICYLQEIFSNEMAKVDDSFFHRLEESFLVEEDKKHERHPIFGNIVDEVAYHEKYPTIYHLRKKLVDSTDKADLRLIYLALAHMIKFRGHFLIEGDLNPDNSDVDKLFIQLVQTYNQLFEENPINASGVDAKAILSARLSKSRRLENLIAQLPGEKKNGLFGNLIALSLGLTPNFKSNFDLAEDAKLQLSKDTYDDDLDNLLAQIGDQYADLFLAAKNLSDAILLSDILRVNTEITKAPLSASMIKRYDEHHQDLTLLKALVRQQLPEKYKEIFFDQSKNGYAGYIDGGASQEEFYKFIKPILEKMDGTEELLVKLNREDLLRKQRTFDNGSIPHQIHLGELHAILRRQEDFYPFLKDNREKIEKILTFRIPYYVGPLARGNSRFAWMTRKSEETITPWNFEEVVDKGASAQSFIERMTNFDKNLPNEKVLPKHSLLYEYFTVYNELTKVKYVTEGMRKPAFLSGEQKKAIVDLLFKTNRKVTVKQLKEDYFKKIECFDSVEISGVEDRFNASLGTYHDLLKIIKDKDFLDNEENEDILEDIVLTLTLFEDREMIEERLKTYAHLFDDKVMKQLKRRRYTGWGRLSRKLINGIRDKQSGKTILDFLKSDGFANRNFMQLIHDDSLTFKEDIQKAQVSGQGDSLHEHIANLAGSPAIKKGILQTVKVVDELVKVMGRHKPENIVIEMARENQTTQKGQKNSRERMKRIEEGIKELGSQILKEHPVENTQLQNEKLYLYYLQNGRDMYVDQELDINRLSDYDVDHIVPQSFLKDDSIDNKVLTRSDKNRGKSDNVPSEEVVKKMKNYWRQLLNAKLITQRKFDNLTKAERGGLSELDKAGFIKRQLVETRQITKHVAQILDSRMNTKYDENDKLIREVKVITLKSKLVSDFRKDFQFYKVREINNYHHAHDAYLNAVVGTALIKKYPKLESEFVYGDYKVYDVRKMIAKSEQEIGKATAKYFFYSNIMNFFKTEITLANGEIRKRPLIETNGETGEIVWDKGRDFATVRKVLSMPQVNIVKKTEVQTGGFSKESILPKRNSDKLIARKKDWDPKKYGGFDSPTVAYSVLVVAKVEKGKSKKLKSVKELLGITIMERSSFEKNPIDFLEAKGYKEVKKDLIIKLPKYSLFELENGRKRMLASAGELQKGNELALPSKYVNFLYLASHYEKLKGSPEDNEQKQLFVEQHKHYLDEIIEQISEFSKRVILADANLDKVLSAYNKHRDKPIREQAENIIHLFTLTNLGAPAAFKYFDTTIDRKRYTSTKEVLDATLIHQSITGLYETRIDLSQLGGDAPKKKRKVGIHGVPAAAGDMRAANLWPSPLMIKRSKKNSLALSLTADQMVSALLDAEPPILYSEYDPTRPFSEASMMGLLTNLADRELVHMINWAKRVPGFVDLTLHDQVHLLECAWLEILMIGLVWRSMEHPVKLLFAPNLLLDRNQGKCVEGMVEIFDMLLATSSRFRMMNLQGEEFVCLKSIILLNSGVYTFLSSTLKSLEEKDHIHRVLDKITDTLIHLMAKAGLTLQQQHQRLAQLLLILSHIRHMSNKGMEHLYSMKCKNVVPLYDLLLEAADAHRLHAPTSRGGASVEETDQSHLATAGSTSSHSLQKYYITGEAEGFPATA

SEQ ID NO: 234 - protein, 2040 aa, Artificial sequence
  #Cas9 variant 15
APKKKRKVGIHGVPAATGGGSAGDMRAANLWPSPLMIKRSKKNSLALSLTADQMVSALLDAEPPILYSEYDPTRPFSEASMMGLLTNLADRELVHMINWAKRVPGFVDLTLHDQVHLLECAWLEILMIGLVWRSMEHPVKLLFAPNLLLDRNQGKCVEGMVEIFDMLLATSSRFRMMNLQGEEFVCLKSIILLNSGVYTFLSSTLKSLEEKDHIHRVLDKITDTLIHLMAKAGLTLQQQHQRLAQLLLILSHIRHMSNKGMEHLYSMKCKNVVPLYDLLLEAADAHRLHAPTSRGGASVEETDQSHLATAGSTSSHSLQKYYITGEAEGFPATASESATPESGADKKYSIGLDIGTNSVGWAVITDEYKVPSKKFKVLGNTDRHSIKKNLIGALLFDSGETAEATRLKRTARRRYTRRKNRICYLQEIFSNEMAKVDDSFFHRLEESFLVEEDKKHERHPIFGNIVDEVAYHEKYPTIYHLRKKLVDSTDKADLRLIYLALAHMIKFRGHFLIEGDLNPDNSDVDKLFIQLVQTYNQLFEENPINASGVDAKAILSARLSKSRRLENLIAQLPGEKKNGLFGNLIALSLGLTPNFKSNFDLAEDAKLQLSKDTYDDDLDNLLAQIGDQYADLFLAAKNLSDAILLSDILRVNTEITKAPLSASMIKRYDEHHQDLTLLKALVRQQLPEKYKEIFFDQSKNGYAGYIDGGASQEEFYKFIKPILEKMDGTEELLVKLNREDLLRKQRTFDNGSIPHQIHLGELHAILRRQEDFYPFLKDNREKIEKILTFRIPYYVGPLARGNSRFAWMTRKSEETITPWNFEEVVDKGASAQSFIERMTNFDKNLPNEKVLPKHSLLYEYFTVYNELTKVKYVTEGMRKPAFLSGEQKKAIVDLLFKTNRKVTVKQLKEDYFKKIECFDSVEISGVEDRFNASLGTYHDLLKIIKDKDFLDNEENEDILEDIVLTLTLFEDREMIEERLKTYAHLFDDKVMKQLKRRRYTGWGRLSRKLINGIRDKQSGKTILDFLKSDGFANRNFMQLIHDDSLTFKEDIQKAQVSGQGDSLHEHIANLAGSPAIKKGILQTVKVVDELVKVMGRHKPENIVIEMARENQTTQKGQKNSRERMKRIEEGIKELGSQILKEHPVENTQLQNEKLYLYYLQNGRDMYVDQELDINRLSDYDVDHIVPQSFLKDDSIDNKVLTRSDKNRGKSDNVPSEEVVKKMKNYWRQLLNAKLITQRKFDNLTKAERGGLSELDKAGFIKRQLVETRQITKHVAQILDSRMNTKYDENDKLIREVKVITLKSKLVSDFRKDFQFYKVREINNYHHAHDAYLNAVVGTALIKKYPKLESEFVYGDYKVYDVRKMIAKSEQEIGKATAKYFFYSNIMNFFKTEITLANGEIRKRPLIETNGETGEIVWDKGRDFATVRKVLSMPQVNIVKKTEVQTGGFSKESILPKRNSDKLIARKKDWDPKKYGGFDSPTVAYSVLVVAKVEKGKSKKLKSVKELLGITIMERSSFEKNPIDFLEAKGYKEVKKDLIIKLPKYSLFELENGRKRMLASAGELQKGNELALPSKYVNFLYLASHYEKLKGSPEDNEQKQLFVEQHKHYLDEIIEQISEFSKRVILADANLDKVLSAYNKHRDKPIREQAENIIHLFTLTNLGAPAAFKYFDTTIDRKRYTSTKEVLDATLIHQSITGLYETRIDLSQLGGDAPKKKRKVGIHGVPAAAGDMRAANLWPSPLMIKRSKKNSLALSLTADQMVSALLDAEPPILYSEYDPTRPFSEASMMGLLTNLADRELVHMINWAKRVPGFVDLTLHDQVHLLECAWLEILMIGLVWRSMEHPVKLLFAPNLLLDRNQGKCVEGMVEIFDMLLATSSRFRMMNLQGEEFVCLKSIILLNSGVYTFLSSTLKSLEEKDHIHRVLDKITDTLIHLMAKAGLTLQQQHQRLAQLLLILSHIRHMSNKGMEHLYSMKCKNVVPLYDLLLEAADAHRLHAPTSRGGASVEETDQSHLATAGSTSSHSLQKYYITGEAEGFPATA

SEQ ID NO: 235 - protein, 2036 aa, Artificial sequence
  #Cas9 variant 16
APKKKRKVGIHGVPAATGGGSAGDMRAANLWPSPLMIKRSKKNSLALSLTADQMVSALLDAEPPILYSEYDPTRPFSEASMMGLLTNLADRELVHMINWAKRVPGFVDLTLHDQVHLLECAWLEILMIGLVWRSMEHPVKLLFAPNLLLDRNQGKCVEGMVEIFDMLLATSSRFRMMNLQGEEFVCLKSIILLNSGVYTFLSSTLKSLEEKDHIHRVLDKITDTLIHLMAKAGLTLQQQHQRLAQLLLILSHIRHMSNKGMEHLYSMKCKNVVPLYDLLLEAADAHRLHAPTSRGGASVEETDQSHLATAGSTSSHSLQKYYITGEAEGFPATASGSEGADKKYSIGLDIGTNSVGWAVITDEYKVPSKKFKVLGNTDRHSIKKNLIGALLFDSGETAEATRLKRTARRRYTRRKNRICYLQEIFSNEMAKVDDSFFHRLEESFLVEEDKKHERHPIFGNIVDEVAYHEKYPTIYHLRKKLVDSTDKADLRLIYLALAHMIKFRGHFLIEGDLNPDNSDVDKLFIQLVQTYNQLFEENPINASGVDAKAILSARLSKSRRLENLIAQLPGEKKNGLFGNLIALSLGLTPNFKSNFDLAEDAKLQLSKDTYDDDLDNLLAQIGDQYADLFLAAKNLSDAILLSDILRVNTEITKAPLSASMIKRYDEHHQDLTLLKALVRQQLPEKYKEIFFDQSKNGYAGYIDGGASQEEFYKFIKPILEKMDGTEELLVKLNREDLLRKQRTFDNGSIPHQIHLGELHAILRRQEDFYPFLKDNREKIEKILTFRIPYYVGPLARGNSRFAWMTRKSEETITPWNFEEVVDKGASAQSFIERMTNFDKNLPNEKVLPKHSLLYEYFTVYNELTKVKYVTEGMRKPAFLSGEQKKAIVDLLFKTNRKVTVKQLKEDYFKKIECFDSVEISGVEDRFNASLGTYHDLLKIIKDKDFLDNEENEDILEDIVLTLTLFEDREMIEERLKTYAHLFDDKVMKQLKRRRYTGWGRLSRKLINGIRDKQSGKTILDFLKSDGFANRNFMQLIHDDSLTFKEDIQKAQVSGQGDSLHEHIANLAGSPAIKKGILQTVKVVDELVKVMGRHKPENIVIEMARENQTTQKGQKNSRERMKRIEEGIKELGSQILKEHPVENTQLQNEKLYLYYLQNGRDMYVDQELDINRLSDYDVDHIVPQSFLKDDSIDNKVLTRSDKNRGKSDNVPSEEVVKKMKNYWRQLLNAKLITQRKFDNLTKAERGGLSELDKAGFIKRQLVETRQITKHVAQILDSRMNTKYDENDKLIREVKVITLKSKLVSDFRKDFQFYKVREINNYHHAHDAYLNAVVGTALIKKYPKLESEFVYGDYKVYDVRKMIAKSEQEIGKATAKYFFYSNIMNFFKTEITLANGEIRKRPLIETNGETGEIVWDKGRDFATVRKVLSMPQVNIVKKTEVQTGGFSKESILPKRNSDKLIARKKDWDPKKYGGFDSPTVAYSVLVVAKVEKGKSKKLKSVKELLGITIMERSSFEKNPIDFLEAKGYKEVKKDLIIKLPKYSLFELENGRKRMLASAGELQKGNELALPSKYVNFLYLASHYEKLKGSPEDNEQKQLFVEQHKHYLDEIIEQISEFSKRVILADANLDKVLSAYNKHRDKPIREQAENIIHLFTLTNLGAPAAFKYFDTTIDRKRYTSTKEVLDATLIHQSITGLYETRIDLSQLGGDAPKKKRKVGIHGVPAAAGDMRAANLWPSPLMIKRSKKNSLALSLTADQMVSALLDAEPPILYSEYDPTRPFSEASMMGLLTNLADRELVHMINWAKRVPGFVDLTLHDQVHLLECAWLEILMIGLVWRSMEHPVKLLFAPNLLLDRNQGKCVEGMVEIFDMLLATSSRFRMMNLQGEEFVCLKSIILLNSGVYTFLSSTLKSLEEKDHIHRVLDKITDTLIHLMAKAGLTLQQQHQRLAQLLLILSHIRHMSNKGMEHLYSMKCKNVVPLYDLLLEAADAHRLHAPTSRGGASVEETDQSHLATAGSTSSHSLQKYYITGEAEGFPATA

SEQ ID NO: 236 - protein, 2029 aa, Artificial sequence
  #Cas9 variant 17
APKKKRKVGIHGVPAATGAGDMRAANLWPSPLMIKRSKKNSLALSLTADQMVSALLDAEPPILYSEYDPTRPFSEASMMGLLTNLADRELVHMINWAKRVPGFVDLTLHDQVHLLECAWLEILMIGLVWRSMEHPVKLLFAPNLLLDRNQGKCVEGMVEIFDMLLATSSRFRMMNLQGEEFVCLKSIILLNSGVYTFLSSTLKSLEEKDHIHRVLDKITDTLIHLMAKAGLTLQQQHQRLAQLLLILSHIRHMSNKGMEHLYSMKCKNVVPLYDLLLEAADAHRLHAPTSRGGASVEETDQSHLATAGSTSSHSLQKYYITGEAEGFPATAPGDKKYSIGLDIGTNSVGWAVITDEYKVPSKKFKVLGNTDRHSIKKNLIGALLFDSGETAEATRLKRTARRRYTRRKNRICYLQEIFSNEMAKVDDSFFHRLEESFLVEEDKKHERHPIFGNIVDEVAYHEKYPTIYHLRKKLVDSTDKADLRLIYLALAHMIKFRGHFLIEGDLNPDNSDVDKLFIQLVQTYNQLFEENPINASGVDAKAILSARLSKSRRLENLIAQLPGEKKNGLFGNLIALSLGLTPNFKSNFDLAEDAKLQLSKDTYDDDLDNLLAQIGDQYADLFLAAKNLSDAILLSDILRVNTEITKAPLSASMIKRYDEHHQDLTLLKALVRQQLPEKYKEIFFDQSKNGYAGYIDGGASQEEFYKFIKPILEKMDGTEELLVKLNREDLLRKQRTFDNGSIPHQIHLGELHAILRRQEDFYPFLKDNREKIEKILTFRIPYYVGPLARGNSRFAWMTRKSEETITPWNFEEVVDKGASAQSFIERMTNFDKNLPNEKVLPKHSLLYEYFTVYNELTKVKYVTEGMRKPAFLSGEQKKAIVDLLFKTNRKVTVKQLKEDYFKKIECFDSVEISGVEDRFNASLGTYHDLLKIIKDKDFLDNEENEDILEDIVLTLTLFEDREMIEERLKTYAHLFDDKVMKQLKRRRYTGWGRLSRKLINGIRDKQSGKTILDFLKSDGFANRNFMQLIHDDSLTFKEDIQKAQVSGQGDSLHEHIANLAGSPAIKKGILQTVKVVDELVKVMGRHKPENIVIEMARENQTTQKGQKNSRERMKRIEEGIKELGSQILKEHPVENTQLQNEKLYLYYLQNGRDMYVDQELDINRLSDYDVDHIVPQSFLKDDSIDNKVLTRSDKNRGKSDNVPSEEVVKKMKNYWRQLLNAKLITQRKFDNLTKAERGGLSELDKAGFIKRQLVETRQITKHVAQILDSRMNTKYDENDKLIREVKVITLKSKLVSDFRKDFQFYKVREINNYHHAHDAYLNAVVGTALIKKYPKLESEFVYGDYKVYDVRKMIAKSEQEIGKATAKYFFYSNIMNFFKTEITLANGEIRKRPLIETNGETGEIVWDKGRDFATVRKVLSMPQVNIVKKTEVQTGGFSKESILPKRNSDKLIARKKDWDPKKYGGFDSPTVAYSVLVVAKVEKGKSKKLKSVKELLGITIMERSSFEKNPIDFLEAKGYKEVKKDLIIKLPKYSLFELENGRKRMLASAGELQKGNELALPSKYVNFLYLASHYEKLKGSPEDNEQKQLFVEQHKHYLDEIIEQISEFSKRVILADANLDKVLSAYNKHRDKPIREQAENIIHLFTLTNLGAPAAFKYFDTTIDRKRYTSTKEVLDATLIHQSITGLYETRIDLSQLGGDAPKKKRKVGIHGVPAAAGDMRAANLWPSPLMIKRSKKNSLALSLTADQMVSALLDAEPPILYSEYDPTRPFSEASMMGLLTNLADRELVHMINWAKRVPGFVDLTLHDQVHLLECAWLEILMIGLVWRSMEHPVKLLFAPNLLLDRNQGKCVEGMVEIFDMLLATSSRFRMMNLQGEEFVCLKSIILLNSGVYTFLSSTLKSLEEKDHIHRVLDKITDTLIHLMAKAGLTLQQQHQRLAQLLLILSHIRHMSNKGMEHLYSMKCKNVVPLYDLLLEAADAHRLHAPTSRGGASVEETDQSHLATAGSTSSHSLQKYYITGEAEGFPATA

SEQ ID NO: 237 - protein, 2032 aa, Artificial sequence
  #Cas9 variant 18
APKKKRKVGIHGVPAATGAGDMRAANLWPSPLMIKRSKKNSLALSLTADQMVSALLDAEPPILYSEYDPTRPFSEASMMGLLTNLADRELVHMINWAKRVPGFVDLTLHDQVHLLECAWLEILMIGLVWRSMEHPVKLLFAPNLLLDRNQGKCVEGMVEIFDMLLATSSRFRMMNLQGEEFVCLKSIILLNSGVYTFLSSTLKSLEEKDHIHRVLDKITDTLIHLMAKAGLTLQQQHQRLAQLLLILSHIRHMSNKGMEHLYSMKCKNVVPLYDLLLEAADAHRLHAPTSRGGASVEETDQSHLATAGSTSSHSLQKYYITGEAEGFPATAGADKKYSIGLDIGTNSVGWAVITDEYKVPSKKFKVLGNTDRHSIKKNLIGALLFDSGETAEATRLKRTARRRYTRRKNRICYLQEIFSNEMAKVDDSFFHRLEESFLVEEDKKHERHPIFGNIVDEVAYHEKYPTIYHLRKKLVDSTDKADLRLIYLALAHMIKFRGHFLIEGDLNPDNSDVDKLFIQLVQTYNQLFEENPINASGVDAKAILSARLSKSRRLENLIAQLPGEKKNGLFGNLIALSLGLTPNFKSNFDLAEDAKLQLSKDTYDDDLDNLLAQIGDQYADLFLAAKNLSDAILLSDILRVNTEITKAPLSASMIKRYDEHHQDLTLLKALVRQQLPEKYKEIFFDQSKNGYAGYIDGGASQEEFYKFIKPILEKMDGTEELLVKLNREDLLRKQRTFDNGSIPHQIHLGELHAILRRQEDFYPFLKDNREKIEKILTFRIPYYVGPLARGNSRFAWMTRKSEETITPWNFEEVVDKGASAQSFIERMTNFDKNLPNEKVLPKHSLLYEYFTVYNELTKVKYVTEGMRKPAFLSGEQKKAIVDLLFKTNRKVTVKQLKEDYFKKIECFDSVEISGVEDRFNASLGTYHDLLKIIKDKDFLDNEENEDILEDIVLTLTLFEDREMIEERLKTYAHLFDDKVMKQLKRRRYTGWGRLSRKLINGIRDKQSGKTILDFLKSDGFANRNFMQLIHDDSLTFKEDIQKAQVSGQGDSLHEHIANLAGSPAIKKGILQTVKVVDELVKVMGRHKPENIVIEMARENQTTQKGQKNSRERMKRIEEGIKELGSQILKEHPVENTQLQNEKLYLYYLQNGRDMYVDQELDINRLSDYDVDHIVPQSFLKDDSIDNKVLTRSDKNRGKSDNVPSEEVVKKMKNYWRQLLNAKLITQRKFDNLTKAERGGLSELDKAGFIKRQLVETRQITKHVAQILDSRMNTKYDENDKLIREVKVITLKSKLVSDFRKDFQFYKVREINNYHHAHDAYLNAVVGTALIKKYPKLESEFVYGDYKVYDVRKMIAKSEQEIGKATAKYFFYSNIMNFFKTEITLANGEIRKRPLIETNGETGEIVWDKGRDFATVRKVLSMPQVNIVKKTEVQTGGFSKESILPKRNSDKLIARKKDWDPKKYGGFDSPTVAYSVLVVAKVEKGKSKKLKSVKELLGITIMERSSFEKNPIDFLEAKGYKEVKKDLIIKLPKYSLFELENGRKRMLASAGELQKGNELALPSKYVNFLYLASHYEKLKGSPEDNEQKQLFVEQHKHYLDEIIEQISEFSKRVILADANLDKVLSAYNKHRDKPIREQAENIIHLFTLTNLGAPAAFKYFDTTIDRKRYTSTKEVLDATLIHQSITGLYETRIDLSQLGGDAPKKKRKVGIHGVPAASGSAGDMRAANLWPSPLMIKRSKKNSLALSLTADQMVSALLDAEPPILYSEYDPTRPFSEASMMGLLTNLADRELVHMINWAKRVPGFVDLTLHDQVHLLECAWLEILMIGLVWRSMEHPVKLLFAPNLLLDRNQGKCVEGMVEIFDMLLATSSRFRMMNLQGEEFVCLKSIILLNSGVYTFLSSTLKSLEEKDHIHRVLDKITDTLIHLMAKAGLTLQQQHQRLAQLLLILSHIRHMSNKGMEHLYSMKCKNVVPLYDLLLEAADAHRLHAPTSRGGASVEETDQSHLATAGSTSSHSLQKYYITGEAEGFPATA

SEQ ID NO: 238 - protein, 2033 aa, Artificial sequence
  #Cas9 variant 19
APKKKRKVGIHGVPAATGAGDMRAANLWPSPLMIKRSKKNSLALSLTADQMVSALLDAEPPILYSEYDPTRPFSEASMMGLLTNLADRELVHMINWAKRVPGFVDLTLHDQVHLLECAWLEILMIGLVWRSMEHPVKLLFAPNLLLDRNQGKCVEGMVEIFDMLLATSSRFRMMNLQGEEFVCLKSIILLNSGVYTFLSSTLKSLEEKDHIHRVLDKITDTLIHLMAKAGLTLQQQHQRLAQLLLILSHIRHMSNKGMEHLYSMKCKNVVPLYDLLLEAADAHRLHAPTSRGGASVEETDQSHLATAGSTSSHSLQKYYITGEAEGFPATAGADKKYSIGLDIGTNSVGWAVITDEYKVPSKKFKVLGNTDRHSIKKNLIGALLFDSGETAEATRLKRTARRRYTRRKNRICYLQEIFSNEMAKVDDSFFHRLEESFLVEEDKKHERHPIFGNIVDEVAYHEKYPTIYHLRKKLVDSTDKADLRLIYLALAHMIKFRGHFLIEGDLNPDNSDVDKLFIQLVQTYNQLFEENPINASGVDAKAILSARLSKSRRLENLIAQLPGEKKNGLFGNLIALSLGLTPNFKSNFDLAEDAKLQLSKDTYDDDLDNLLAQIGDQYADLFLAAKNLSDAILLSDILRVNTEITKAPLSASMIKRYDEHHQDLTLLKALVRQQLPEKYKEIFFDQSKNGYAGYIDGGASQEEFYKFIKPILEKMDGTEELLVKLNREDLLRKQRTFDNGSIPHQIHLGELHAILRRQEDFYPFLKDNREKIEKILTFRIPYYVGPLARGNSRFAWMTRKSEETITPWNFEEVVDKGASAQSFIERMTNFDKNLPNEKVLPKHSLLYEYFTVYNELTKVKYVTEGMRKPAFLSGEQKKAIVDLLFKTNRKVTVKQLKEDYFKKIECFDSVEISGVEDRFNASLGTYHDLLKIIKDKDFLDNEENEDILEDIVLTLTLFEDREMIEERLKTYAHLFDDKVMKQLKRRRYTGWGRLSRKLINGIRDKQSGKTILDFLKSDGFANRNFMQLIHDDSLTFKEDIQKAQVSGQGDSLHEHIANLAGSPAIKKGILQTVKVVDELVKVMGRHKPENIVIEMARENQTTQKGQKNSRERMKRIEEGIKELGSQILKEHPVENTQLQNEKLYLYYLQNGRDMYVDQELDINRLSDYDVDHIVPQSFLKDDSIDNKVLTRSDKNRGKSDNVPSEEVVKKMKNYWRQLLNAKLITQRKFDNLTKAERGGLSELDKAGFIKRQLVETRQITKHVAQILDSRMNTKYDENDKLIREVKVITLKSKLVSDFRKDFQFYKVREINNYHHAHDAYLNAVVGTALIKKYPKLESEFVYGDYKVYDVRKMIAKSEQEIGKATAKYFFYSNIMNFFKTEITLANGEIRKRPLIETNGETGEIVWDKGRDFATVRKVLSMPQVNIVKKTEVQTGGFSKESILPKRNSDKLIARKKDWDPKKYGGFDSPTVAYSVLVVAKVEKGKSKKLKSVKELLGITIMERSSFEKNPIDFLEAKGYKEVKKDLIIKLPKYSLFELENGRKRMLASAGELQKGNELALPSKYVNFLYLASHYEKLKGSPEDNEQKQLFVEQHKHYLDEIIEQISEFSKRVILADANLDKVLSAYNKHRDKPIREQAENIIHLFTLTNLGAPAAFKYFDTTIDRKRYTSTKEVLDATLIHQSITGLYETRIDLSQLGGDAPKKKRKVGIHGVPAAGGGSAGDMRAANLWPSPLMIKRSKKNSLALSLTADQMVSALLDAEPPILYSEYDPTRPFSEASMMGLLTNLADRELVHMINWAKRVPGFVDLTLHDQVHLLECAWLEILMIGLVWRSMEHPVKLLFAPNLLLDRNQGKCVEGMVEIFDMLLATSSRFRMMNLQGEEFVCLKSIILLNSGVYTFLSSTLKSLEEKDHIHRVLDKITDTLIHLMAKAGLTLQQQHQRLAQLLLILSHIRHMSNKGMEHLYSMKCKNVVPLYDLLLEAADAHRLHAPTSRGGASVEETDQSHLATAGSTSSHSLQKYYITGEAEGFPATA

SEQ ID NO: 239 - protein, 2349 aa, Artificial sequence
  #Cas9 variant 20
SRADPKKKRKVTGAGDMRAANLWPSPLMIKRSKKNSLALSLTADQMVSALLDAEPPILYSEYDPTRPFSEASMMGLLTNLADRELVHMINWAKRVPGFVDLTLHDQVHLLECAWLEILMIGLVWRSMEHPVKLLFAPNLLLDRNQGKCVEGMVEIFDMLLATSSRFRMMNLQGEEFVCLKSIILLNSGVYTFLSSTLKSLEEKDHIHRVLDKITDTLIHLMAKAGLTLQQQHQRLAQLLLILSHIRHMSNKGMEHLYSMKCKNVVPLYDLLLEAADAHRLHAPTSRGGASVEETDQSHLATAGSTSSHSLQKYYITGEAEGFPATAGGSPRGGSAGDMRAANLWPSPLMIKRSKKNSLALSLTADQMVSALLDAEPPILYSEYDPTRPFSEASMMGLLTNLADRELVHMINWAKRVPGFVDLTLHDQVHLLECAWLEILMIGLVWRSMEHPVKLLFAPNLLLDRNQGKCVEGMVEIFDMLLATSSRFRMMNLQGEEFVCLKSIILLNSGVYTFLSSTLKSLEEKDHIHRVLDKITDTLIHLMAKAGLTLQQQHQRLAQLLLILSHIRHMSNKGMEHLYSMKCKNVVPLYDLLLEAADAHRLHAPTSRGGASVEETDQSHLATAGSTSSHSLQKYYITGEAEGFPATATPESGADKKYSIGLDIGTNSVGWAVITDEYKVPSKKFKVLGNTDRHSIKKNLIGALLFDSGETAEATRLKRTARRRYTRRKNRICYLQEIFSNEMAKVDDSFFHRLEESFLVEEDKKHERHPIFGNIVDEVAYHEKYPTIYHLRKKLVDSTDKADLRLIYLALAHMIKFRGHFLIEGDLNPDNSDVDKLFIQLVQTYNQLFEENPINASGVDAKAILSARLSKSRRLENLIAQLPGEKKNGLFGNLIALSLGLTPNFKSNFDLAEDAKLQLSKDTYDDDLDNLLAQIGDQYADLFLAAKNLSDAILLSDILRVNTEITKAPLSASMIKRYDEHHQDLTLLKALVRQQLPEKYKEIFFDQSKNGYAGYIDGGASQEEFYKFIKPILEKMDGTEELLVKLNREDLLRKQRTFDNGSIPHQIHLGELHAILRRQEDFYPFLKDNREKIEKILTFRIPYYVGPLARGNSRFAWMTRKSEETITPWNFEEVVDKGASAQSFIERMTNFDKNLPNEKVLPKHSLLYEYFTVYNELTKVKYVTEGMRKPAFLSGEQKKAIVDLLFKTNRKVTVKQLKEDYFKKIECFDSVEISGVEDRFNASLGTYHDLLKIIKDKDFLDNEENEDILEDIVLTLTLFEDREMIEERLKTYAHLFDDKVMKQLKRRRYTGWGRLSRKLINGIRDKQSGKTILDFLKSDGFANRNFMQLIHDDSLTFKEDIQKAQVSGQGDSLHEHIANLAGSPAIKKGILQTVKVVDELVKVMGRHKPENIVIEMARENQTTQKGQKNSRERMKRIEEGIKELGSQILKEHPVENTQLQNEKLYLYYLQNGRDMYVDQELDINRLSDYDVDHIVPQSFLKDDSIDNKVLTRSDKNRGKSDNVPSEEVVKKMKNYWRQLLNAKLITQRKFDNLTKAERGGLSELDKAGFIKRQLVETRQITKHVAQILDSRMNTKYDENDKLIREVKVITLKSKLVSDFRKDFQFYKVREINNYHHAHDAYLNAVVGTALIKKYPKLESEFVYGDYKVYDVRKMIAKSEQEIGKATAKYFFYSNIMNFFKTEITLANGEIRKRPLIETNGETGEIVWDKGRDFATVRKVLSMPQVNIVKKTEVQTGGFSKESILPKRNSDKLIARKKDWDPKKYGGFDSPTVAYSVLVVAKVEKGKSKKLKSVKELLGITIMERSSFEKNPIDFLEAKGYKEVKKDLIIKLPKYSLFELENGRKRMLASAGELQKGNELALPSKYVNFLYLASHYEKLKGSPEDNEQKQLFVEQHKHYLDEIIEQISEFSKRVILADANLDKVLSAYNKHRDKPIREQAENIIHLFTLTNLGAPAAFKYFDTTIDRKRYTSTKEVLDATLIHQSITGLYETRIDLSQLGGDAPKKKRKVGIHGVPAAAGDMRAANLWPSPLMIKRSKKNSLALSLTADQMVSALLDAEPPILYSEYDPTRPFSEASMMGLLTNLADRELVHMINWAKRVPGFVDLTLHDQVHLLECAWLEILMIGLVWRSMEHPVKLLFAPNLLLDRNQGKCVEGMVEIFDMLLATSSRFRMMNLQGEEFVCLKSIILLNSGVYTFLSSTLKSLEEKDHIHRVLDKITDTLIHLMAKAGLTLQQQHQRLAQLLLILSHIRHMSNKGMEHLYSMKCKNVVPLYDLLLEAADAHRLHAPTSRGGASVEETDQSHLATAGSTSSHSLQKYYITGEAEGFPATA

SEQ ID NO: 240 - protein, 2357 aa, Artificial sequence
  #Cas9 variant 21
APKKKRKVGIHGVPAATGGGSAGDMRAANLWPSPLMIKRSKKNSLALSLTADQMVSALLDAEPPILYSEYDPTRPFSEASMMGLLTNLADRELVHMINWAKRVPGFVDLTLHDQVHLLECAWLEILMIGLVWRSMEHPVKLLFAPNLLLDRNQGKCVEGMVEIFDMLLATSSRFRMMNLQGEEFVCLKSIILLNSGVYTFLSSTLKSLEEKDHIHRVLDKITDTLIHLMAKAGLTLQQQHQRLAQLLLILSHIRHMSNKGMEHLYSMKCKNVVPLYDLLLEAADAHRLHAPTSRGGASVEETDQSHLATAGSTSSHSLQKYYITGEAEGFPATAGGSPRGGSAGDMRAANLWPSPLMIKRSKKNSLALSLTADQMVSALLDAEPPILYSEYDPTRPFSEASMMGLLTNLADRELVHMINWAKRVPGFVDLTLHDQVHLLECAWLEILMIGLVWRSMEHPVKLLFAPNLLLDRNQGKCVEGMVEIFDMLLATSSRFRMMNLQGEEFVCLKSIILLNSGVYTFLSSTLKSLEEKDHIHRVLDKITDTLIHLMAKAGLTLQQQHQRLAQLLLILSHIRHMSNKGMEHLYSMKCKNVVPLYDLLLEAADAHRLHAPTSRGGASVEETDQSHLATAGSTSSHSLQKYYITGEAEGFPATATPESGADKKYSIGLDIGTNSVGWAVITDEYKVPSKKFKVLGNTDRHSIKKNLIGALLFDSGETAEATRLKRTARRRYTRRKNRICYLQEIFSNEMAKVDDSFFHRLEESFLVEEDKKHERHPIFGNIVDEVAYHEKYPTIYHLRKKLVDSTDKADLRLIYLALAHMIKFRGHFLIEGDLNPDNSDVDKLFIQLVQTYNQLFEENPINASGVDAKAILSARLSKSRRLENLIAQLPGEKKNGLFGNLIALSLGLTPNFKSNFDLAEDAKLQLSKDTYDDDLDNLLAQIGDQYADLFLAAKNLSDAILLSDILRVNTEITKAPLSASMIKRYDEHHQDLTLLKALVRQQLPEKYKEIFFDQSKNGYAGYIDGGASQEEFYKFIKPILEKMDGTEELLVKLNREDLLRKQRTFDNGSIPHQIHLGELHAILRRQEDFYPFLKDNREKIEKILTFRIPYYVGPLARGNSRFAWMTRKSEETITPWNFEEVVDKGASAQSFIERMTNFDKNLPNEKVLPKHSLLYEYFTVYNELTKVKYVTEGMRKPAFLSGEQKKAIVDLLFKTNRKVTVKQLKEDYFKKIECFDSVEISGVEDRFNASLGTYHDLLKIIKDKDFLDNEENEDILEDIVLTLTLFEDREMIEERLKTYAHLFDDKVMKQLKRRRYTGWGRLSRKLINGIRDKQSGKTILDFLKSDGFANRNFMQLIHDDSLTFKEDIQKAQVSGQGDSLHEHIANLAGSPAIKKGILQTVKVVDELVKVMGRHKPENIVIEMARENQTTQKGQKNSRERMKRIEEGIKELGSQILKEHPVENTQLQNEKLYLYYLQNGRDMYVDQELDINRLSDYDVDHIVPQSFLKDDSIDNKVLTRSDKNRGKSDNVPSEEVVKKMKNYWRQLLNAKLITQRKFDNLTKAERGGLSELDKAGFIKRQLVETRQITKHVAQILDSRMNTKYDENDKLIREVKVITLKSKLVSDFRKDFQFYKVREINNYHHAHDAYLNAVVGTALIKKYPKLESEFVYGDYKVYDVRKMIAKSEQEIGKATAKYFFYSNIMNFFKTEITLANGEIRKRPLIETNGETGEIVWDKGRDFATVRKVLSMPQVNIVKKTEVQTGGFSKESILPKRNSDKLIARKKDWDPKKYGGFDSPTVAYSVLVVAKVEKGKSKKLKSVKELLGITIMERSSFEKNPIDFLEAKGYKEVKKDLIIKLPKYSLFELENGRKRMLASAGELQKGNELALPSKYVNFLYLASHYEKLKGSPEDNEQKQLFVEQHKHYLDEIIEQISEFSKRVILADANLDKVLSAYNKHRDKPIREQAENIIHLFTLTNLGAPAAFKYFDTTIDRKRYTSTKEVLDATLIHQSITGLYETRIDLSQLGGDAPKKKRKVGIHGVPAAAGDMRAANLWPSPLMIKRSKKNSLALSLTADQMVSALLDAEPPILYSEYDPTRPFSEASMMGLLTNLADRELVHMINWAKRVPGFVDLTLHDQVHLLECAWLEILMIGLVWRSMEHPVKLLFAPNLLLDRNQGKCVEGMVEIFDMLLATSSRFRMMNLQGEEFVCLKSIILLNSGVYTFLSSTLKSLEEKDHIHRVLDKITDTLIHLMAKAGLTLQQQHQRLAQLLLILSHIRHMSNKGMEHLYSMKCKNVVPLYDLLLEAADAHRLHAPTSRGGASVEETDQSHLATAGSTSSHSLQKYYITGEAEGFPATA

SEQ ID NO: 241 - protein, 2354 aa, Artificial sequence
  #Cas9 variant 22
APKKKRKVGIHGVPAATGGGSAGDMRAANLWPSPLMIKRSKKNSLALSLTADQMVSALLDAEPPILYSEYDPTRPFSEASMMGLLTNLADRELVHMINWAKRVPGFVDLTLHDQVHLLECAWLEILMIGLVWRSMEHPVKLLFAPNLLLDRNQGKCVEGMVEIFDMLLATSSRFRMMNLQGEEFVCLKSIILLNSGVYTFLSSTLKSLEEKDHIHRVLDKITDTLIHLMAKAGLTLQQQHQRLAQLLLILSHIRHMSNKGMEHLYSMKCKNVVPLYDLLLEAADAHRLHAPTSRGGASVEETDQSHLATAGSTSSHSLQKYYITGEAEGFPATAPRGGSAGDMRAANLWPSPLMIKRSKKNSLALSLTADQMVSALLDAEPPILYSEYDPTRPFSEASMMGLLTNLADRELVHMINWAKRVPGFVDLTLHDQVHLLECAWLEILMIGLVWRSMEHPVKLLFAPNLLLDRNQGKCVEGMVEIFDMLLATSSRFRMMNLQGEEFVCLKSIILLNSGVYTFLSSTLKSLEEKDHIHRVLDKITDTLIHLMAKAGLTLQQQHQRLAQLLLILSHIRHMSNKGMEHLYSMKCKNVVPLYDLLLEAADAHRLHAPTSRGGASVEETDQSHLATAGSTSSHSLQKYYITGEAEGFPATATPESGADKKYSIGLDIGTNSVGWAVITDEYKVPSKKFKVLGNTDRHSIKKNLIGALLFDSGETAEATRLKRTARRRYTRRKNRICYLQEIFSNEMAKVDDSFFHRLEESFLVEEDKKHERHPIFGNIVDEVAYHEKYPTIYHLRKKLVDSTDKADLRLIYLALAHMIKFRGHFLIEGDLNPDNSDVDKLFIQLVQTYNQLFEENPINASGVDAKAILSARLSKSRRLENLIAQLPGEKKNGLFGNLIALSLGLTPNFKSNFDLAEDAKLQLSKDTYDDDLDNLLAQIGDQYADLFLAAKNLSDAILLSDILRVNTEITKAPLSASMIKRYDEHHQDLTLLKALVRQQLPEKYKEIFFDQSKNGYAGYIDGGASQEEFYKFIKPILEKMDGTEELLVKLNREDLLRKQRTFDNGSIPHQIHLGELHAILRRQEDFYPFLKDNREKIEKILTFRIPYYVGPLARGNSRFAWMTRKSEETITPWNFEEVVDKGASAQSFIERMTNFDKNLPNEKVLPKHSLLYEYFTVYNELTKVKYVTEGMRKPAFLSGEQKKAIVDLLFKTNRKVTVKQLKEDYFKKIECFDSVEISGVEDRFNASLGTYHDLLKIIKDKDFLDNEENEDILEDIVLTLTLFEDREMIEERLKTYAHLFDDKVMKQLKRRRYTGWGRLSRKLINGIRDKQSGKTILDFLKSDGFANRNFMQLIHDDSLTFKEDIQKAQVSGQGDSLHEHIANLAGSPAIKKGILQTVKVVDELVKVMGRHKPENIVIEMARENQTTQKGQKNSRERMKRIEEGIKELGSQILKEHPVENTQLQNEKLYLYYLQNGRDMYVDQELDINRLSDYDVDHIVPQSFLKDDSIDNKVLTRSDKNRGKSDNVPSEEVVKKMKNYWRQLLNAKLITQRKFDNLTKAERGGLSELDKAGFIKRQLVETRQITKHVAQILDSRMNTKYDENDKLIREVKVITLKSKLVSDFRKDFQFYKVREINNYHHAHDAYLNAVVGTALIKKYPKLESEFVYGDYKVYDVRKMIAKSEQEIGKATAKYFFYSNIMNFFKTEITLANGEIRKRPLIETNGETGEIVWDKGRDFATVRKVLSMPQVNIVKKTEVQTGGFSKESILPKRNSDKLIARKKDWDPKKYGGFDSPTVAYSVLVVAKVEKGKSKKLKSVKELLGITIMERSSFEKNPIDFLEAKGYKEVKKDLIIKLPKYSLFELENGRKRMLASAGELQKGNELALPSKYVNFLYLASHYEKLKGSPEDNEQKQLFVEQHKHYLDEIIEQISEFSKRVILADANLDKVLSAYNKHRDKPIREQAENIIHLFTLTNLGAPAAFKYFDTTIDRKRYTSTKEVLDATLIHQSITGLYETRIDLSQLGGDAPKKKRKVGIHGVPAAAGDMRAANLWPSPLMIKRSKKNSLALSLTADQMVSALLDAEPPILYSEYDPTRPFSEASMMGLLTNLADRELVHMINWAKRVPGFVDLTLHDQVHLLECAWLEILMIGLVWRSMEHPVKLLFAPNLLLDRNQGKCVEGMVEIFDMLLATSSRFRMMNLQGEEFVCLKSIILLNSGVYTFLSSTLKSLEEKDHIHRVLDKITDTLIHLMAKAGLTLQQQHQRLAQLLLILSHIRHMSNKGMEHLYSMKCKNVVPLYDLLLEAADAHRLHAPTSRGGASVEETDQSHLATAGSTSSHSLQKYYITGEAEGFPATA

SEQ ID NO: 242 - protein, 2345 aa, Artificial sequence
  #Cas9 variant 23
APKKKRKVGIHGVPAATGAGDMRAANLWPSPLMIKRSKKNSLALSLTADQMVSALLDAEPPILYSEYDPTRPFSEASMMGLLTNLADRELVHMINWAKRVPGFVDLTLHDQVHLLECAWLEILMIGLVWRSMEHPVKLLFAPNLLLDRNQGKCVEGMVEIFDMLLATSSRFRMMNLQGEEFVCLKSIILLNSGVYTFLSSTLKSLEEKDHIHRVLDKITDTLIHLMAKAGLTLQQQHQRLAQLLLILSHIRHMSNKGMEHLYSMKCKNVVPLYDLLLEAADAHRLHAPTSRGGASVEETDQSHLATAGSTSSHSLQKYYITGEAEGFPATAGADKKYSIGLDIGTNSVGWAVITDEYKVPSKKFKVLGNTDRHSIKKNLIGALLFDSGETAEATRLKRTARRRYTRRKNRICYLQEIFSNEMAKVDDSFFHRLEESFLVEEDKKHERHPIFGNIVDEVAYHEKYPTIYHLRKKLVDSTDKADLRLIYLALAHMIKFRGHFLIEGDLNPDNSDVDKLFIQLVQTYNQLFEENPINASGVDAKAILSARLSKSRRLENLIAQLPGEKKNGLFGNLIALSLGLTPNFKSNFDLAEDAKLQLSKDTYDDDLDNLLAQIGDQYADLFLAAKNLSDAILLSDILRVNTEITKAPLSASMIKRYDEHHQDLTLLKALVRQQLPEKYKEIFFDQSKNGYAGYIDGGASQEEFYKFIKPILEKMDGTEELLVKLNREDLLRKQRTFDNGSIPHQIHLGELHAILRRQEDFYPFLKDNREKIEKILTFRIPYYVGPLARGNSRFAWMTRKSEETITPWNFEEVVDKGASAQSFIERMTNFDKNLPNEKVLPKHSLLYEYFTVYNELTKVKYVTEGMRKPAFLSGEQKKAIVDLLFKTNRKVTVKQLKEDYFKKIECFDSVEISGVEDRFNASLGTYHDLLKIIKDKDFLDNEENEDILEDIVLTLTLFEDREMIEERLKTYAHLFDDKVMKQLKRRRYTGWGRLSRKLINGIRDKQSGKTILDFLKSDGFANRNFMQLIHDDSLTFKEDIQKAQVSGQGDSLHEHIANLAGSPAIKKGILQTVKVVDELVKVMGRHKPENIVIEMARENQTTQKGQKNSRERMKRIEEGIKELGSQILKEHPVENTQLQNEKLYLYYLQNGRDMYVDQELDINRLSDYDVDHIVPQSFLKDDSIDNKVLTRSDKNRGKSDNVPSEEVVKKMKNYWRQLLNAKLITQRKFDNLTKAERGGLSELDKAGFIKRQLVETRQITKHVAQILDSRMNTKYDENDKLIREVKVITLKSKLVSDFRKDFQFYKVREINNYHHAHDAYLNAVVGTALIKKYPKLESEFVYGDYKVYDVRKMIAKSEQEIGKATAKYFFYSNIMNFFKTEITLANGEIRKRPLIETNGETGEIVWDKGRDFATVRKVLSMPQVNIVKKTEVQTGGFSKESILPKRNSDKLIARKKDWDPKKYGGFDSPTVAYSVLVVAKVEKGKSKKLKSVKELLGITIMERSSFEKNPIDFLEAKGYKEVKKDLIIKLPKYSLFELENGRKRMLASAGELQKGNELALPSKYVNFLYLASHYEKLKGSPEDNEQKQLFVEQHKHYLDEIIEQISEFSKRVILADANLDKVLSAYNKHRDKPIREQAENIIHLFTLTNLGAPAAFKYFDTTIDRKRYTSTKEVLDATLIHQSITGLYETRIDLSQLGGDAPKKKRKVGIHGVPAAAGDMRAANLWPSPLMIKRSKKNSLALSLTADQMVSALLDAEPPILYSEYDPTRPFSEASMMGLLTNLADRELVHMINWAKRVPGFVDLTLHDQVHLLECAWLEILMIGLVWRSMEHPVKLLFAPNLLLDRNQGKCVEGMVEIFDMLLATSSRFRMMNLQGEEFVCLKSIILLNSGVYTFLSSTLKSLEEKDHIHRVLDKITDTLIHLMAKAGLTLQQQHQRLAQLLLILSHIRHMSNKGMEHLYSMKCKNVVPLYDLLLEAADAHRLHAPTSRGGASVEETDQSHLATAGSTSSHSLQKYYITGEAEGFPATAPAGAGDMRAANLWPSPLMIKRSKKNSLALSLTADQMVSALLDAEPPILYSEYDPTRPFSEASMMGLLTNLADRELVHMINWAKRVPGFVDLTLHDQVHLLECAWLEILMIGLVWRSMEHPVKLLFAPNLLLDRNQGKCVEGMVEIFDMLLATSSRFRMMNLQGEEFVCLKSIILLNSGVYTFLSSTLKSLEEKDHIHRVLDKITDTLIHLMAKAGLTLQQQHQRLAQLLLILSHIRHMSNKGMEHLYSMKCKNVVPLYDLLLEAADAHRLHAPTSRGGASVEETDQSHLATAGSTSSHSLQKYYITGEAEGFPATA

SEQ ID NO: 243 - protein, 2348 aa, Artificial sequence
  #Cas9 variant 24
APKKKRKVGIHGVPAATGAGDMRAANLWPSPLMIKRSKKNSLALSLTADQMVSALLDAEPPILYSEYDPTRPFSEASMMGLLTNLADRELVHMINWAKRVPGFVDLTLHDQVHLLECAWLEILMIGLVWRSMEHPVKLLFAPNLLLDRNQGKCVEGMVEIFDMLLATSSRFRMMNLQGEEFVCLKSIILLNSGVYTFLSSTLKSLEEKDHIHRVLDKITDTLIHLMAKAGLTLQQQHQRLAQLLLILSHIRHMSNKGMEHLYSMKCKNVVPLYDLLLEAADAHRLHAPTSRGGASVEETDQSHLATAGSTSSHSLQKYYITGEAEGFPATAGADKKYSIGLDIGTNSVGWAVITDEYKVPSKKFKVLGNTDRHSIKKNLIGALLFDSGETAEATRLKRTARRRYTRRKNRICYLQEIFSNEMAKVDDSFFHRLEESFLVEEDKKHERHPIFGNIVDEVAYHEKYPTIYHLRKKLVDSTDKADLRLIYLALAHMIKFRGHFLIEGDLNPDNSDVDKLFIQLVQTYNQLFEENPINASGVDAKAILSARLSKSRRLENLIAQLPGEKKNGLFGNLIALSLGLTPNFKSNFDLAEDAKLQLSKDTYDDDLDNLLAQIGDQYADLFLAAKNLSDAILLSDILRVNTEITKAPLSASMIKRYDEHHQDLTLLKALVRQQLPEKYKEIFFDQSKNGYAGYIDGGASQEEFYKFIKPILEKMDGTEELLVKLNREDLLRKQRTFDNGSIPHQIHLGELHAILRRQEDFYPFLKDNREKIEKILTFRIPYYVGPLARGNSRFAWMTRKSEETITPWNFEEVVDKGASAQSFIERMTNFDKNLPNEKVLPKHSLLYEYFTVYNELTKVKYVTEGMRKPAFLSGEQKKAIVDLLFKTNRKVTVKQLKEDYFKKIECFDSVEISGVEDRFNASLGTYHDLLKIIKDKDFLDNEENEDILEDIVLTLTLFEDREMIEERLKTYAHLFDDKVMKQLKRRRYTGWGRLSRKLINGIRDKQSGKTILDFLKSDGFANRNFMQLIHDDSLTFKEDIQKAQVSGQGDSLHEHIANLAGSPAIKKGILQTVKVVDELVKVMGRHKPENIVIEMARENQTTQKGQKNSRERMKRIEEGIKELGSQILKEHPVENTQLQNEKLYLYYLQNGRDMYVDQELDINRLSDYDVDHIVPQSFLKDDSIDNKVLTRSDKNRGKSDNVPSEEVVKKMKNYWRQLLNAKLITQRKFDNLTKAERGGLSELDKAGFIKRQLVETRQITKHVAQILDSRMNTKYDENDKLIREVKVITLKSKLVSDFRKDFQFYKVREINNYHHAHDAYLNAVVGTALIKKYPKLESEFVYGDYKVYDVRKMIAKSEQEIGKATAKYFFYSNIMNFFKTEITLANGEIRKRPLIETNGETGEIVWDKGRDFATVRKVLSMPQVNIVKKTEVQTGGFSKESILPKRNSDKLIARKKDWDPKKYGGFDSPTVAYSVLVVAKVEKGKSKKLKSVKELLGITIMERSSFEKNPIDFLEAKGYKEVKKDLIIKLPKYSLFELENGRKRMLASAGELQKGNELALPSKYVNFLYLASHYEKLKGSPEDNEQKQLFVEQHKHYLDEIIEQISEFSKRVILADANLDKVLSAYNKHRDKPIREQAENIIHLFTLTNLGAPAAFKYFDTTIDRKRYTSTKEVLDATLIHQSITGLYETRIDLSQLGGDAPKKKRKVGIHGVPAAAGDMRAANLWPSPLMIKRSKKNSLALSLTADQMVSALLDAEPPILYSEYDPTRPFSEASMMGLLTNLADRELVHMINWAKRVPGFVDLTLHDQVHLLECAWLEILMIGLVWRSMEHPVKLLFAPNLLLDRNQGKCVEGMVEIFDMLLATSSRFRMMNLQGEEFVCLKSIILLNSGVYTFLSSTLKSLEEKDHIHRVLDKITDTLIHLMAKAGLTLQQQHQRLAQLLLILSHIRHMSNKGMEHLYSMKCKNVVPLYDLLLEAADAHRLHAPTSRGGASVEETDQSHLATAGSTSSHSLQKYYITGEAEGFPATAPAGGGSAGDMRAANLWPSPLMIKRSKKNSLALSLTADQMVSALLDAEPPILYSEYDPTRPFSEASMMGLLTNLADRELVHMINWAKRVPGFVDLTLHDQVHLLECAWLEILMIGLVWRSMEHPVKLLFAPNLLLDRNQGKCVEGMVEIFDMLLATSSRFRMMNLQGEEFVCLKSIILLNSGVYTFLSSTLKSLEEKDHIHRVLDKITDTLIHLMAKAGLTLQQQHQRLAQLLLILSHIRHMSNKGMEHLYSMKCKNVVPLYDLLLEAADAHRLHAPTSRGGASVEETDQSHLATAGSTSSHSLQKYYITGEAEGFPATA

SEQ ID NO: 244 - protein, 2673 aa, Artificial sequence
  #Cas9 variant 25
APKKKRKVGIHGVPAATGAGDMRAANLWPSPLMIKRSKKNSLALSLTADQMVSALLDAEPPILYSEYDPTRPFSEASMMGLLTNLADRELVHMINWAKRVPGFVDLTLHDQVHLLECAWLEILMIGLVWRSMEHPVKLLFAPNLLLDRNQGKCVEGMVEIFDMLLATSSRFRMMNLQGEEFVCLKSIILLNSGVYTFLSSTLKSLEEKDHIHRVLDKITDTLIHLMAKAGLTLQQQHQRLAQLLLILSHIRHMSNKGMEHLYSMKCKNVVPLYDLLLEAADAHRLHAPTSRGGASVEETDQSHLATAGSTSSHSLQKYYITGEAEGFPATAGGSPRGGSAGDMRAANLWPSPLMIKRSKKNSLALSLTADQMVSALLDAEPPILYSEYDPTRPFSEASMMGLLTNLADRELVHMINWAKRVPGFVDLTLHDQVHLLECAWLEILMIGLVWRSMEHPVKLLFAPNLLLDRNQGKCVEGMVEIFDMLLATSSRFRMMNLQGEEFVCLKSIILLNSGVYTFLSSTLKSLEEKDHIHRVLDKITDTLIHLMAKAGLTLQQQHQRLAQLLLILSHIRHMSNKGMEHLYSMKCKNVVPLYDLLLEAADAHRLHAPTSRGGASVEETDQSHLATAGSTSSHSLQKYYITGEAEGFPATATPESGADKKYSIGLDIGTNSVGWAVITDEYKVPSKKFKVLGNTDRHSIKKNLIGALLFDSGETAEATRLKRTARRRYTRRKNRICYLQEIFSNEMAKVDDSFFHRLEESFLVEEDKKHERHPIFGNIVDEVAYHEKYPTIYHLRKKLVDSTDKADLRLIYLALAHMIKFRGHFLIEGDLNPDNSDVDKLFIQLVQTYNQLFEENPINASGVDAKAILSARLSKSRRLENLIAQLPGEKKNGLFGNLIALSLGLTPNFKSNFDLAEDAKLQLSKDTYDDDLDNLLAQIGDQYADLFLAAKNLSDAILLSDILRVNTEITKAPLSASMIKRYDEHHQDLTLLKALVRQQLPEKYKEIFFDQSKNGYAGYIDGGASQEEFYKFIKPILEKMDGTEELLVKLNREDLLRKQRTFDNGSIPHQIHLGELHAILRRQEDFYPFLKDNREKIEKILTFRIPYYVGPLARGNSRFAWMTRKSEETITPWNFEEVVDKGASAQSFIERMTNFDKNLPNEKVLPKHSLLYEYFTVYNELTKVKYVTEGMRKPAFLSGEQKKAIVDLLFKTNRKVTVKQLKEDYFKKIECFDSVEISGVEDRFNASLGTYHDLLKIIKDKDFLDNEENEDILEDIVLTLTLFEDREMIEERLKTYAHLFDDKVMKQLKRRRYTGWGRLSRKLINGIRDKQSGKTILDFLKSDGFANRNFMQLIHDDSLTFKEDIQKAQVSGQGDSLHEHIANLAGSPAIKKGILQTVKVVDELVKVMGRHKPENIVIEMARENQTTQKGQKNSRERMKRIEEGIKELGSQILKEHPVENTQLQNEKLYLYYLQNGRDMYVDQELDINRLSDYDVDHIVPQSFLKDDSIDNKVLTRSDKNRGKSDNVPSEEVVKKMKNYWRQLLNAKLITQRKFDNLTKAERGGLSELDKAGFIKRQLVETRQITKHVAQILDSRMNTKYDENDKLIREVKVITLKSKLVSDFRKDFQFYKVREINNYHHAHDAYLNAVVGTALIKKYPKLESEFVYGDYKVYDVRKMIAKSEQEIGKATAKYFFYSNIMNFFKTEITLANGEIRKRPLIETNGETGEIVWDKGRDFATVRKVLSMPQVNIVKKTEVQTGGFSKESILPKRNSDKLIARKKDWDPKKYGGFDSPTVAYSVLVVAKVEKGKSKKLKSVKELLGITIMERSSFEKNPIDFLEAKGYKEVKKDLIIKLPKYSLFELENGRKRMLASAGELQKGNELALPSKYVNFLYLASHYEKLKGSPEDNEQKQLFVEQHKHYLDEIIEQISEFSKRVILADANLDKVLSAYNKHRDKPIREQAENIIHLFTLTNLGAPAAFKYFDTTIDRKRYTSTKEVLDATLIHQSITGLYETRIDLSQLGGDAPKKKRKVGIHGVPAAAGDMRAANLWPSPLMIKRSKKNSLALSLTADQMVSALLDAEPPILYSEYDPTRPFSEASMMGLLTNLADRELVHMINWAKRVPGFVDLTLHDQVHLLECAWLEILMIGLVWRSMEHPVKLLFAPNLLLDRNQGKCVEGMVEIFDMLLATSSRFRMMNLQGEEFVCLKSIILLNSGVYTFLSSTLKSLEEKDHIHRVLDKITDTLIHLMAKAGLTLQQQHQRLAQLLLILSHIRHMSNKGMEHLYSMKCKNVVPLYDLLLEAADAHRLHAPTSRGGASVEETDQSHLATAGSTSSHSLQKYYITGEAEGFPATAPAGGGSAGDMRAANLWPSPLMIKRSKKNSLALSLTADQMVSALLDAEPPILYSEYDPTRPFSEASMMGLLTNLADRELVHMINWAKRVPGFVDLTLHDQVHLLECAWLEILMIGLVWRSMEHPVKLLFAPNLLLDRNQGKCVEGMVEIFDMLLATSSRFRMMNLQGEEFVCLKSIILLNSGVYTFLSSTLKSLEEKDHIHRVLDKITDTLIHLMAKAGLTLQQQHQRLAQLLLILSHIRHMSNKGMEHLYSMKCKNVVPLYDLLLEAADAHRLHAPTSRGGASVEETDQSHLATAGSTSSHSLQKYYITGEAEGFPATA

SEQ ID NO: 245 - protein, 2676 aa, Artificial sequence
  #Cas9 variant 26
APKKKRKVGIHGVPAATGGGSAGDMRAANLWPSPLMIKRSKKNSLALSLTADQMVSALLDAEPPILYSEYDPTRPFSEASMMGLLTNLADRELVHMINWAKRVPGFVDLTLHDQVHLLECAWLEILMIGLVWRSMEHPVKLLFAPNLLLDRNQGKCVEGMVEIFDMLLATSSRFRMMNLQGEEFVCLKSIILLNSGVYTFLSSTLKSLEEKDHIHRVLDKITDTLIHLMAKAGLTLQQQHQRLAQLLLILSHIRHMSNKGMEHLYSMKCKNVVPLYDLLLEAADAHRLHAPTSRGGASVEETDQSHLATAGSTSSHSLQKYYITGEAEGFPATAGGSPRGGSAGDMRAANLWPSPLMIKRSKKNSLALSLTADQMVSALLDAEPPILYSEYDPTRPFSEASMMGLLTNLADRELVHMINWAKRVPGFVDLTLHDQVHLLECAWLEILMIGLVWRSMEHPVKLLFAPNLLLDRNQGKCVEGMVEIFDMLLATSSRFRMMNLQGEEFVCLKSIILLNSGVYTFLSSTLKSLEEKDHIHRVLDKITDTLIHLMAKAGLTLQQQHQRLAQLLLILSHIRHMSNKGMEHLYSMKCKNVVPLYDLLLEAADAHRLHAPTSRGGASVEETDQSHLATAGSTSSHSLQKYYITGEAEGFPATATPESGADKKYSIGLDIGTNSVGWAVITDEYKVPSKKFKVLGNTDRHSIKKNLIGALLFDSGETAEATRLKRTARRRYTRRKNRICYLQEIFSNEMAKVDDSFFHRLEESFLVEEDKKHERHPIFGNIVDEVAYHEKYPTIYHLRKKLVDSTDKADLRLIYLALAHMIKFRGHFLIEGDLNPDNSDVDKLFIQLVQTYNQLFEENPINASGVDAKAILSARLSKSRRLENLIAQLPGEKKNGLFGNLIALSLGLTPNFKSNFDLAEDAKLQLSKDTYDDDLDNLLAQIGDQYADLFLAAKNLSDAILLSDILRVNTEITKAPLSASMIKRYDEHHQDLTLLKALVRQQLPEKYKEIFFDQSKNGYAGYIDGGASQEEFYKFIKPILEKMDGTEELLVKLNREDLLRKQRTFDNGSIPHQIHLGELHAILRRQEDFYPFLKDNREKIEKILTFRIPYYVGPLARGNSRFAWMTRKSEETITPWNFEEVVDKGASAQSFIERMTNFDKNLPNEKVLPKHSLLYEYFTVYNELTKVKYVTEGMRKPAFLSGEQKKAIVDLLFKTNRKVTVKQLKEDYFKKIECFDSVEISGVEDRFNASLGTYHDLLKIIKDKDFLDNEENEDILEDIVLTLTLFEDREMIEERLKTYAHLFDDKVMKQLKRRRYTGWGRLSRKLINGIRDKQSGKTILDFLKSDGFANRNFMQLIHDDSLTFKEDIQKAQVSGQGDSLHEHIANLAGSPAIKKGILQTVKVVDELVKVMGRHKPENIVIEMARENQTTQKGQKNSRERMKRIEEGIKELGSQILKEHPVENTQLQNEKLYLYYLQNGRDMYVDQELDINRLSDYDVDHIVPQSFLKDDSIDNKVLTRSDKNRGKSDNVPSEEVVKKMKNYWRQLLNAKLITQRKFDNLTKAERGGLSELDKAGFIKRQLVETRQITKHVAQILDSRMNTKYDENDKLIREVKVITLKSKLVSDFRKDFQFYKVREINNYHHAHDAYLNAVVGTALIKKYPKLESEFVYGDYKVYDVRKMIAKSEQEIGKATAKYFFYSNIMNFFKTEITLANGEIRKRPLIETNGETGEIVWDKGRDFATVRKVLSMPQVNIVKKTEVQTGGFSKESILPKRNSDKLIARKKDWDPKKYGGFDSPTVAYSVLVVAKVEKGKSKKLKSVKELLGITIMERSSFEKNPIDFLEAKGYKEVKKDLIIKLPKYSLFELENGRKRMLASAGELQKGNELALPSKYVNFLYLASHYEKLKGSPEDNEQKQLFVEQHKHYLDEIIEQISEFSKRVILADANLDKVLSAYNKHRDKPIREQAENIIHLFTLTNLGAPAAFKYFDTTIDRKRYTSTKEVLDATLIHQSITGLYETRIDLSQLGGDAPKKKRKVGIHGVPAAAGDMRAANLWPSPLMIKRSKKNSLALSLTADQMVSALLDAEPPILYSEYDPTRPFSEASMMGLLTNLADRELVHMINWAKRVPGFVDLTLHDQVHLLECAWLEILMIGLVWRSMEHPVKLLFAPNLLLDRNQGKCVEGMVEIFDMLLATSSRFRMMNLQGEEFVCLKSIILLNSGVYTFLSSTLKSLEEKDHIHRVLDKITDTLIHLMAKAGLTLQQQHQRLAQLLLILSHIRHMSNKGMEHLYSMKCKNVVPLYDLLLEAADAHRLHAPTSRGGASVEETDQSHLATAGSTSSHSLQKYYITGEAEGFPATAPAGGGSAGDMRAANLWPSPLMIKRSKKNSLALSLTADQMVSALLDAEPPILYSEYDPTRPFSEASMMGLLTNLADRELVHMINWAKRVPGFVDLTLHDQVHLLECAWLEILMIGLVWRSMEHPVKLLFAPNLLLDRNQGKCVEGMVEIFDMLLATSSRFRMMNLQGEEFVCLKSIILLNSGVYTFLSSTLKSLEEKDHIHRVLDKITDTLIHLMAKAGLTLQQQHQRLAQLLLILSHIRHMSNKGMEHLYSMKCKNVVPLYDLLLEAADAHRLHAPTSRGGASVEETDQSHLATAGSTSSHSLQKYYITGEAEGFPATA

SEQ ID NO: 246 - protein, 2670 aa, Artificial sequence
  #Cas9 variant 27
APKKKRKVGIHGVPAATGGGSAGDMRAANLWPSPLMIKRSKKNSLALSLTADQMVSALLDAEPPILYSEYDPTRPFSEASMMGLLTNLADRELVHMINWAKRVPGFVDLTLHDQVHLLECAWLEILMIGLVWRSMEHPVKLLFAPNLLLDRNQGKCVEGMVEIFDMLLATSSRFRMMNLQGEEFVCLKSIILLNSGVYTFLSSTLKSLEEKDHIHRVLDKITDTLIHLMAKAGLTLQQQHQRLAQLLLILSHIRHMSNKGMEHLYSMKCKNVVPLYDLLLEAADAHRLHAPTSRGGASVEETDQSHLATAGSTSSHSLQKYYITGEAEGFPATAPRGGSAGDMRAANLWPSPLMIKRSKKNSLALSLTADQMVSALLDAEPPILYSEYDPTRPFSEASMMGLLTNLADRELVHMINWAKRVPGFVDLTLHDQVHLLECAWLEILMIGLVWRSMEHPVKLLFAPNLLLDRNQGKCVEGMVEIFDMLLATSSRFRMMNLQGEEFVCLKSIILLNSGVYTFLSSTLKSLEEKDHIHRVLDKITDTLIHLMAKAGLTLQQQHQRLAQLLLILSHIRHMSNKGMEHLYSMKCKNVVPLYDLLLEAADAHRLHAPTSRGGASVEETDQSHLATAGSTSSHSLQKYYITGEAEGFPATATPESGADKKYSIGLDIGTNSVGWAVITDEYKVPSKKFKVLGNTDRHSIKKNLIGALLFDSGETAEATRLKRTARRRYTRRKNRICYLQEIFSNEMAKVDDSFFHRLEESFLVEEDKKHERHPIFGNIVDEVAYHEKYPTIYHLRKKLVDSTDKADLRLIYLALAHMIKFRGHFLIEGDLNPDNSDVDKLFIQLVQTYNQLFEENPINASGVDAKAILSARLSKSRRLENLIAQLPGEKKNGLFGNLIALSLGLTPNFKSNFDLAEDAKLQLSKDTYDDDLDNLLAQIGDQYADLFLAAKNLSDAILLSDILRVNTEITKAPLSASMIKRYDEHHQDLTLLKALVRQQLPEKYKEIFFDQSKNGYAGYIDGGASQEEFYKFIKPILEKMDGTEELLVKLNREDLLRKQRTFDNGSIPHQIHLGELHAILRRQEDFYPFLKDNREKIEKILTFRIPYYVGPLARGNSRFAWMTRKSEETITPWNFEEVVDKGASAQSFIERMTNFDKNLPNEKVLPKHSLLYEYFTVYNELTKVKYVTEGMRKPAFLSGEQKKAIVDLLFKTNRKVTVKQLKEDYFKKIECFDSVEISGVEDRFNASLGTYHDLLKIIKDKDFLDNEENEDILEDIVLTLTLFEDREMIEERLKTYAHLFDDKVMKQLKRRRYTGWGRLSRKLINGIRDKQSGKTILDFLKSDGFANRNFMQLIHDDSLTFKEDIQKAQVSGQGDSLHEHIANLAGSPAIKKGILQTVKVVDELVKVMGRHKPENIVIEMARENQTTQKGQKNSRERMKRIEEGIKELGSQILKEHPVENTQLQNEKLYLYYLQNGRDMYVDQELDINRLSDYDVDHIVPQSFLKDDSIDNKVLTRSDKNRGKSDNVPSEEVVKKMKNYWRQLLNAKLITQRKFDNLTKAERGGLSELDKAGFIKRQLVETRQITKHVAQILDSRMNTKYDENDKLIREVKVITLKSKLVSDFRKDFQFYKVREINNYHHAHDAYLNAVVGTALIKKYPKLESEFVYGDYKVYDVRKMIAKSEQEIGKATAKYFFYSNIMNFFKTEITLANGEIRKRPLIETNGETGEIVWDKGRDFATVRKVLSMPQVNIVKKTEVQTGGFSKESILPKRNSDKLIARKKDWDPKKYGGFDSPTVAYSVLVVAKVEKGKSKKLKSVKELLGITIMERSSFEKNPIDFLEAKGYKEVKKDLIIKLPKYSLFELENGRKRMLASAGELQKGNELALPSKYVNFLYLASHYEKLKGSPEDNEQKQLFVEQHKHYLDEIIEQISEFSKRVILADANLDKVLSAYNKHRDKPIREQAENIIHLFTLTNLGAPAAFKYFDTTIDRKRYTSTKEVLDATLIHQSITGLYETRIDLSQLGGDAPKKKRKVGIHGVPAAAGDMRAANLWPSPLMIKRSKKNSLALSLTADQMVSALLDAEPPILYSEYDPTRPFSEASMMGLLTNLADRELVHMINWAKRVPGFVDLTLHDQVHLLECAWLEILMIGLVWRSMEHPVKLLFAPNLLLDRNQGKCVEGMVEIFDMLLATSSRFRMMNLQGEEFVCLKSIILLNSGVYTFLSSTLKSLEEKDHIHRVLDKITDTLIHLMAKAGLTLQQQHQRLAQLLLILSHIRHMSNKGMEHLYSMKCKNVVPLYDLLLEAADAHRLHAPTSRGGASVEETDQSHLATAGSTSSHSLQKYYITGEAEGFPATAPAGAGDMRAANLWPSPLMIKRSKKNSLALSLTADQMVSALLDAEPPILYSEYDPTRPFSEASMMGLLTNLADRELVHMINWAKRVPGFVDLTLHDQVHLLECAWLEILMIGLVWRSMEHPVKLLFAPNLLLDRNQGKCVEGMVEIFDMLLATSSRFRMMNLQGEEFVCLKSIILLNSGVYTFLSSTLKSLEEKDHIHRVLDKITDTLIHLMAKAGLTLQQQHQRLAQLLLILSHIRHMSNKGMEHLYSMKCKNVVPLYDLLLEAADAHRLHAPTSRGGASVEETDQSHLATAGSTSSHSLQKYYITGEAEGFPATA

SEQ ID NO: 247 - protein, 2673 aa, Artificial sequence
  #Cas9 variant 28
APKKKRKVGIHGVPAATGGGSAGDMRAANLWPSPLMIKRSKKNSLALSLTADQMVSALLDAEPPILYSEYDPTRPFSEASMMGLLTNLADRELVHMINWAKRVPGFVDLTLHDQVHLLECAWLEILMIGLVWRSMEHPVKLLFAPNLLLDRNQGKCVEGMVEIFDMLLATSSRFRMMNLQGEEFVCLKSIILLNSGVYTFLSSTLKSLEEKDHIHRVLDKITDTLIHLMAKAGLTLQQQHQRLAQLLLILSHIRHMSNKGMEHLYSMKCKNVVPLYDLLLEAADAHRLHAPTSRGGASVEETDQSHLATAGSTSSHSLQKYYITGEAEGFPATAGGSPRGGSAGDMRAANLWPSPLMIKRSKKNSLALSLTADQMVSALLDAEPPILYSEYDPTRPFSEASMMGLLTNLADRELVHMINWAKRVPGFVDLTLHDQVHLLECAWLEILMIGLVWRSMEHPVKLLFAPNLLLDRNQGKCVEGMVEIFDMLLATSSRFRMMNLQGEEFVCLKSIILLNSGVYTFLSSTLKSLEEKDHIHRVLDKITDTLIHLMAKAGLTLQQQHQRLAQLLLILSHIRHMSNKGMEHLYSMKCKNVVPLYDLLLEAADAHRLHAPTSRGGASVEETDQSHLATAGSTSSHSLQKYYITGEAEGFPATATPESGADKKYSIGLDIGTNSVGWAVITDEYKVPSKKFKVLGNTDRHSIKKNLIGALLFDSGETAEATRLKRTARRRYTRRKNRICYLQEIFSNEMAKVDDSFFHRLEESFLVEEDKKHERHPIFGNIVDEVAYHEKYPTIYHLRKKLVDSTDKADLRLIYLALAHMIKFRGHFLIEGDLNPDNSDVDKLFIQLVQTYNQLFEENPINASGVDAKAILSARLSKSRRLENLIAQLPGEKKNGLFGNLIALSLGLTPNFKSNFDLAEDAKLQLSKDTYDDDLDNLLAQIGDQYADLFLAAKNLSDAILLSDILRVNTEITKAPLSASMIKRYDEHHQDLTLLKALVRQQLPEKYKEIFFDQSKNGYAGYIDGGASQEEFYKFIKPILEKMDGTEELLVKLNREDLLRKQRTFDNGSIPHQIHLGELHAILRRQEDFYPFLKDNREKIEKILTFRIPYYVGPLARGNSRFAWMTRKSEETITPWNFEEVVDKGASAQSFIERMTNFDKNLPNEKVLPKHSLLYEYFTVYNELTKVKYVTEGMRKPAFLSGEQKKAIVDLLFKTNRKVTVKQLKEDYFKKIECFDSVEISGVEDRFNASLGTYHDLLKIIKDKDFLDNEENEDILEDIVLTLTLFEDREMIEERLKTYAHLFDDKVMKQLKRRRYTGWGRLSRKLINGIRDKQSGKTILDFLKSDGFANRNFMQLIHDDSLTFKEDIQKAQVSGQGDSLHEHIANLAGSPAIKKGILQTVKVVDELVKVMGRHKPENIVIEMARENQTTQKGQKNSRERMKRIEEGIKELGSQILKEHPVENTQLQNEKLYLYYLQNGRDMYVDQELDINRLSDYDVDHIVPQSFLKDDSIDNKVLTRSDKNRGKSDNVPSEEVVKKMKNYWRQLLNAKLITQRKFDNLTKAERGGLSELDKAGFIKRQLVETRQITKHVAQILDSRMNTKYDENDKLIREVKVITLKSKLVSDFRKDFQFYKVREINNYHHAHDAYLNAVVGTALIKKYPKLESEFVYGDYKVYDVRKMIAKSEQEIGKATAKYFFYSNIMNFFKTEITLANGEIRKRPLIETNGETGEIVWDKGRDFATVRKVLSMPQVNIVKKTEVQTGGFSKESILPKRNSDKLIARKKDWDPKKYGGFDSPTVAYSVLVVAKVEKGKSKKLKSVKELLGITIMERSSFEKNPIDFLEAKGYKEVKKDLIIKLPKYSLFELENGRKRMLASAGELQKGNELALPSKYVNFLYLASHYEKLKGSPEDNEQKQLFVEQHKHYLDEIIEQISEFSKRVILADANLDKVLSAYNKHRDKPIREQAENIIHLFTLTNLGAPAAFKYFDTTIDRKRYTSTKEVLDATLIHQSITGLYETRIDLSQLGGDAPKKKRKVGIHGVPAAAGDMRAANLWPSPLMIKRSKKNSLALSLTADQMVSALLDAEPPILYSEYDPTRPFSEASMMGLLTNLADRELVHMINWAKRVPGFVDLTLHDQVHLLECAWLEILMIGLVWRSMEHPVKLLFAPNLLLDRNQGKCVEGMVEIFDMLLATSSRFRMMNLQGEEFVCLKSIILLNSGVYTFLSSTLKSLEEKDHIHRVLDKITDTLIHLMAKAGLTLQQQHQRLAQLLLILSHIRHMSNKGMEHLYSMKCKNVVPLYDLLLEAADAHRLHAPTSRGGASVEETDQSHLATAGSTSSHSLQKYYITGEAEGFPATAPAGAGDMRAANLWPSPLMIKRSKKNSLALSLTADQMVSALLDAEPPILYSEYDPTRPFSEASMMGLLTNLADRELVHMINWAKRVPGFVDLTLHDQVHLLECAWLEILMIGLVWRSMEHPVKLLFAPNLLLDRNQGKCVEGMVEIFDMLLATSSRFRMMNLQGEEFVCLKSIILLNSGVYTFLSSTLKSLEEKDHIHRVLDKITDTLIHLMAKAGLTLQQQHQRLAQLLLILSHIRHMSNKGMEHLYSMKCKNVVPLYDLLLEAADAHRLHAPTSRGGASVEETDQSHLATAGSTSSHSLQKYYITGEAEGFPATA

SEQ ID NO: 248 - protein, 2670 aa, Artificial sequence
  #Cas9 variant 29
APKKKRKVGIHGVPAATGAGDMRAANLWPSPLMIKRSKKNSLALSLTADQMVSALLDAEPPILYSEYDPTRPFSEASMMGLLTNLADRELVHMINWAKRVPGFVDLTLHDQVHLLECAWLEILMIGLVWRSMEHPVKLLFAPNLLLDRNQGKCVEGMVEIFDMLLATSSRFRMMNLQGEEFVCLKSIILLNSGVYTFLSSTLKSLEEKDHIHRVLDKITDTLIHLMAKAGLTLQQQHQRLAQLLLILSHIRHMSNKGMEHLYSMKCKNVVPLYDLLLEAADAHRLHAPTSRGGASVEETDQSHLATAGSTSSHSLQKYYITGEAEGFPATAGGSPRGGSAGDMRAANLWPSPLMIKRSKKNSLALSLTADQMVSALLDAEPPILYSEYDPTRPFSEASMMGLLTNLADRELVHMINWAKRVPGFVDLTLHDQVHLLECAWLEILMIGLVWRSMEHPVKLLFAPNLLLDRNQGKCVEGMVEIFDMLLATSSRFRMMNLQGEEFVCLKSIILLNSGVYTFLSSTLKSLEEKDHIHRVLDKITDTLIHLMAKAGLTLQQQHQRLAQLLLILSHIRHMSNKGMEHLYSMKCKNVVPLYDLLLEAADAHRLHAPTSRGGASVEETDQSHLATAGSTSSHSLQKYYITGEAEGFPATATPESGADKKYSIGLDIGTNSVGWAVITDEYKVPSKKFKVLGNTDRHSIKKNLIGALLFDSGETAEATRLKRTARRRYTRRKNRICYLQEIFSNEMAKVDDSFFHRLEESFLVEEDKKHERHPIFGNIVDEVAYHEKYPTIYHLRKKLVDSTDKADLRLIYLALAHMIKFRGHFLIEGDLNPDNSDVDKLFIQLVQTYNQLFEENPINASGVDAKAILSARLSKSRRLENLIAQLPGEKKNGLFGNLIALSLGLTPNFKSNFDLAEDAKLQLSKDTYDDDLDNLLAQIGDQYADLFLAAKNLSDAILLSDILRVNTEITKAPLSASMIKRYDEHHQDLTLLKALVRQQLPEKYKEIFFDQSKNGYAGYIDGGASQEEFYKFIKPILEKMDGTEELLVKLNREDLLRKQRTFDNGSIPHQIHLGELHAILRRQEDFYPFLKDNREKIEKILTFRIPYYVGPLARGNSRFAWMTRKSEETITPWNFEEVVDKGASAQSFIERMTNFDKNLPNEKVLPKHSLLYEYFTVYNELTKVKYVTEGMRKPAFLSGEQKKAIVDLLFKTNRKVTVKQLKEDYFKKIECFDSVEISGVEDRFNASLGTYHDLLKIIKDKDFLDNEENEDILEDIVLTLTLFEDREMIEERLKTYAHLFDDKVMKQLKRRRYTGWGRLSRKLINGIRDKQSGKTILDFLKSDGFANRNFMQLIHDDSLTFKEDIQKAQVSGQGDSLHEHIANLAGSPAIKKGILQTVKVVDELVKVMGRHKPENIVIEMARENQTTQKGQKNSRERMKRIEEGIKELGSQILKEHPVENTQLQNEKLYLYYLQNGRDMYVDQELDINRLSDYDVDHIVPQSFLKDDSIDNKVLTRSDKNRGKSDNVPSEEVVKKMKNYWRQLLNAKLITQRKFDNLTKAERGGLSELDKAGFIKRQLVETRQITKHVAQILDSRMNTKYDENDKLIREVKVITLKSKLVSDFRKDFQFYKVREINNYHHAHDAYLNAVVGTALIKKYPKLESEFVYGDYKVYDVRKMIAKSEQEIGKATAKYFFYSNIMNFFKTEITLANGEIRKRPLIETNGETGEIVWDKGRDFATVRKVLSMPQVNIVKKTEVQTGGFSKESILPKRNSDKLIARKKDWDPKKYGGFDSPTVAYSVLVVAKVEKGKSKKLKSVKELLGITIMERSSFEKNPIDFLEAKGYKEVKKDLIIKLPKYSLFELENGRKRMLASAGELQKGNELALPSKYVNFLYLASHYEKLKGSPEDNEQKQLFVEQHKHYLDEIIEQISEFSKRVILADANLDKVLSAYNKHRDKPIREQAENIIHLFTLTNLGAPAAFKYFDTTIDRKRYTSTKEVLDATLIHQSITGLYETRIDLSQLGGDAPKKKRKVGIHGVPAAAGDMRAANLWPSPLMIKRSKKNSLALSLTADQMVSALLDAEPPILYSEYDPTRPFSEASMMGLLTNLADRELVHMINWAKRVPGFVDLTLHDQVHLLECAWLEILMIGLVWRSMEHPVKLLFAPNLLLDRNQGKCVEGMVEIFDMLLATSSRFRMMNLQGEEFVCLKSIILLNSGVYTFLSSTLKSLEEKDHIHRVLDKITDTLIHLMAKAGLTLQQQHQRLAQLLLILSHIRHMSNKGMEHLYSMKCKNVVPLYDLLLEAADAHRLHAPTSRGGASVEETDQSHLATAGSTSSHSLQKYYITGEAEGFPATAPAGAGDMRAANLWPSPLMIKRSKKNSLALSLTADQMVSALLDAEPPILYSEYDPTRPFSEASMMGLLTNLADRELVHMINWAKRVPGFVDLTLHDQVHLLECAWLEILMIGLVWRSMEHPVKLLFAPNLLLDRNQGKCVEGMVEIFDMLLATSSRFRMMNLQGEEFVCLKSIILLNSGVYTFLSSTLKSLEEKDHIHRVLDKITDTLIHLMAKAGLTLQQQHQRLAQLLLILSHIRHMSNKGMEHLYSMKCKNVVPLYDLLLEAADAHRLHAPTSRGGASVEETDQSHLATAGSTSSHSLQKYYITGEAEGFPATA

SEQ ID NO: 249 - protein, 2673 aa, Artificial sequence
  #Cas9 variant 30
APKKKRKVGIHGVPAATGGGSAGDMRAANLWPSPLMIKRSKKNSLALSLTADQMVSALLDAEPPILYSEYDPTRPFSEASMMGLLTNLADRELVHMINWAKRVPGFVDLTLHDQVHLLECAWLEILMIGLVWRSMEHPVKLLFAPNLLLDRNQGKCVEGMVEIFDMLLATSSRFRMMNLQGEEFVCLKSIILLNSGVYTFLSSTLKSLEEKDHIHRVLDKITDTLIHLMAKAGLTLQQQHQRLAQLLLILSHIRHMSNKGMEHLYSMKCKNVVPLYDLLLEAADAHRLHAPTSRGGASVEETDQSHLATAGSTSSHSLQKYYITGEAEGFPATAPRGGSAGDMRAANLWPSPLMIKRSKKNSLALSLTADQMVSALLDAEPPILYSEYDPTRPFSEASMMGLLTNLADRELVHMINWAKRVPGFVDLTLHDQVHLLECAWLEILMIGLVWRSMEHPVKLLFAPNLLLDRNQGKCVEGMVEIFDMLLATSSRFRMMNLQGEEFVCLKSIILLNSGVYTFLSSTLKSLEEKDHIHRVLDKITDTLIHLMAKAGLTLQQQHQRLAQLLLILSHIRHMSNKGMEHLYSMKCKNVVPLYDLLLEAADAHRLHAPTSRGGASVEETDQSHLATAGSTSSHSLQKYYITGEAEGFPATATPESGADKKYSIGLDIGTNSVGWAVITDEYKVPSKKFKVLGNTDRHSIKKNLIGALLFDSGETAEATRLKRTARRRYTRRKNRICYLQEIFSNEMAKVDDSFFHRLEESFLVEEDKKHERHPIFGNIVDEVAYHEKYPTIYHLRKKLVDSTDKADLRLIYLALAHMIKFRGHFLIEGDLNPDNSDVDKLFIQLVQTYNQLFEENPINASGVDAKAILSARLSKSRRLENLIAQLPGEKKNGLFGNLIALSLGLTPNFKSNFDLAEDAKLQLSKDTYDDDLDNLLAQIGDQYADLFLAAKNLSDAILLSDILRVNTEITKAPLSASMIKRYDEHHQDLTLLKALVRQQLPEKYKEIFFDQSKNGYAGYIDGGASQEEFYKFIKPILEKMDGTEELLVKLNREDLLRKQRTFDNGSIPHQIHLGELHAILRRQEDFYPFLKDNREKIEKILTFRIPYYVGPLARGNSRFAWMTRKSEETITPWNFEEVVDKGASAQSFIERMTNFDKNLPNEKVLPKHSLLYEYFTVYNELTKVKYVTEGMRKPAFLSGEQKKAIVDLLFKTNRKVTVKQLKEDYFKKIECFDSVEISGVEDRFNASLGTYHDLLKIIKDKDFLDNEENEDILEDIVLTLTLFEDREMIEERLKTYAHLFDDKVMKQLKRRRYTGWGRLSRKLINGIRDKQSGKTILDFLKSDGFANRNFMQLIHDDSLTFKEDIQKAQVSGQGDSLHEHIANLAGSPAIKKGILQTVKVVDELVKVMGRHKPENIVIEMARENQTTQKGQKNSRERMKRIEEGIKELGSQILKEHPVENTQLQNEKLYLYYLQNGRDMYVDQELDINRLSDYDVDHIVPQSFLKDDSIDNKVLTRSDKNRGKSDNVPSEEVVKKMKNYWRQLLNAKLITQRKFDNLTKAERGGLSELDKAGFIKRQLVETRQITKHVAQILDSRMNTKYDENDKLIREVKVITLKSKLVSDFRKDFQFYKVREINNYHHAHDAYLNAVVGTALIKKYPKLESEFVYGDYKVYDVRKMIAKSEQEIGKATAKYFFYSNIMNFFKTEITLANGEIRKRPLIETNGETGEIVWDKGRDFATVRKVLSMPQVNIVKKTEVQTGGFSKESILPKRNSDKLIARKKDWDPKKYGGFDSPTVAYSVLVVAKVEKGKSKKLKSVKELLGITIMERSSFEKNPIDFLEAKGYKEVKKDLIIKLPKYSLFELENGRKRMLASAGELQKGNELALPSKYVNFLYLASHYEKLKGSPEDNEQKQLFVEQHKHYLDEIIEQISEFSKRVILADANLDKVLSAYNKHRDKPIREQAENIIHLFTLTNLGAPAAFKYFDTTIDRKRYTSTKEVLDATLIHQSITGLYETRIDLSQLGGDAPKKKRKVGIHGVPAAAGDMRAANLWPSPLMIKRSKKNSLALSLTADQMVSALLDAEPPILYSEYDPTRPFSEASMMGLLTNLADRELVHMINWAKRVPGFVDLTLHDQVHLLECAWLEILMIGLVWRSMEHPVKLLFAPNLLLDRNQGKCVEGMVEIFDMLLATSSRFRMMNLQGEEFVCLKSIILLNSGVYTFLSSTLKSLEEKDHIHRVLDKITDTLIHLMAKAGLTLQQQHQRLAQLLLILSHIRHMSNKGMEHLYSMKCKNVVPLYDLLLEAADAHRLHAPTSRGGASVEETDQSHLATAGSTSSHSLQKYYITGEAEGFPATAPAGGGSAGDMRAANLWPSPLMIKRSKKNSLALSLTADQMVSALLDAEPPILYSEYDPTRPFSEASMMGLLTNLADRELVHMINWAKRVPGFVDLTLHDQVHLLECAWLEILMIGLVWRSMEHPVKLLFAPNLLLDRNQGKCVEGMVEIFDMLLATSSRFRMMNLQGEEFVCLKSIILLNSGVYTFLSSTLKSLEEKDHIHRVLDKITDTLIHLMAKAGLTLQQQHQRLAQLLLILSHIRHMSNKGMEHLYSMKCKNVVPLYDLLLEAADAHRLHAPTSRGGASVEETDQSHLATAGSTSSHSLQKYYITGEAEGFPATA

SEQ ID NO: 250 - protein, 2036 aa, Artificial Sequence
  #Cas9 variant 1
APKKKRKVGIHGVPAATGAGDMRAANLWPSPLMIKRSKKNSLALSLTADQMVSALLDAEPPILYSEYDPTRPFSEASMMGLLTNLADRELVHMINWAKRVPGFVDLTLHDQVHLLECAWLEILMIGLVWRSMEHPVKLLFAPNLLLDRNQGKCVEGMVEIFDMLLATSSRFRMMNLQGEEFVCLKSIILLNSGVYTFLSSTLKSLEEKDHIHRVLDKITDTLIHLMAKAGLTLQQQHQRLAQLLLILSHIRHMSNKGMEHLYSMKCKNVVPLYDLLLEAADAHRLHAPTSRGGASVEETDQSHLATAGSTSSHSLQKYYITGEAEGFPATASGSETPGTSESAGADKKYSIGLDIGTNSVGWAVITDEYKVPSKKFKVLGNTDRHSIKKNLIGALLFDSGETAEATRLKRTARRRYTRRKNRICYLQEIFSNEMAKVDDSFFHRLEESFLVEEDKKHERHPIFGNIVDEVAYHEKYPTIYHLRKKLVDSTDKADLRLIYLALAHMIKFRGHFLIEGDLNPDNSDVDKLFIQLVQTYNQLFEENPINASGVDAKAILSARLSKSRRLENLIAQLPGEKKNGLFGNLIALSLGLTPNFKSNFDLAEDAKLQLSKDTYDDDLDNLLAQIGDQYADLFLAAKNLSDAILLSDILRVNTEITKAPLSASMIKRYDEHHQDLTLLKALVRQQLPEKYKEIFFDQSKNGYAGYIDGGASQEEFYKFIKPILEKMDGTEELLVKLNREDLLRKQRTFDNGSIPHQIHLGELHAILRRQEDFYPFLKDNREKIEKILTFRIPYYVGPLARGNSRFAWMTRKSEETITPWNFEEVVDKGASAQSFIERMTNFDKNLPNEKVLPKHSLLYEYFTVYNELTKVKYVTEGMRKPAFLSGEQKKAIVDLLFKTNRKVTVKQLKEDYFKKIECFDSVEISGVEDRFNASLGTYHDLLKIIKDKDFLDNEENEDILEDIVLTLTLFEDREMIEERLKTYAHLFDDKVMKQLKRRRYTGWGRLSRKLINGIRDKQSGKTILDFLKSDGFANRNFMQLIHDDSLTFKEDIQKAQVSGQGDSLHEHIANLAGSPAIKKGILQTVKVVDELVKVMGRHKPENIVIEMARENQTTQKGQKNSRERMKRIEEGIKELGSQILKEHPVENTQLQNEKLYLYYLQNGRDMYVDQELDINRLSDYDVDHIVPQSFLKDDSIDNKVLTRSDKNRGKSDNVPSEEVVKKMKNYWRQLLNAKLITQRKFDNLTKAERGGLSELDKAGFIKRQLVETRQITKHVAQILDSRMNTKYDENDKLIREVKVITLKSKLVSDFRKDFQFYKVREINNYHHAHDAYLNAVVGTALIKKYPKLESEFVYGDYKVYDVRKMIAKSEQEIGKATAKYFFYSNIMNFFKTEITLANGEIRKRPLIETNGETGEIVWDKGRDFATVRKVLSMPQVNIVKKTEVQTGGFSKESILPKRNSDKLIARKKDWDPKKYGGFDSPTVAYSVLVVAKVEKGKSKKLKSVKELLGITIMERSSFEKNPIDFLEAKGYKEVKKDLIIKLPKYSLFELENGRKRMLASAGELQKGNELALPSKYVNFLYLASHYEKLKGSPEDNEQKQLFVEQHKHYLDEIIEQISEFSKRVILADANLDKVLSAYNKHRDKPIREQAENIIHLFTLTNLGAPAAFKYFDTTIDRKRYTSTKEVLDATLIHQSITGLYETRIDLSQLGGDSRADPKKKRKVAGDMRAANLWPSPLMIKRSKKNSLALSLTADQMVSALLDAEPPILYSEYDPTRPFSEASMMGLLTNLADRELVHMINWAKRVPGFVDLTLHDQVHLLECAWLEILMIGLVWRSMEHPVKLLFAPNLLLDRNQGKCVEGMVEIFDMLLATSSRFRMMNLQGEEFVCLKSIILLNSGVYTFLSSTLKSLEEKDHIHRVLDKITDTLIHLMAKAGLTLQQQHQRLAQLLLILSHIRHMSNKGMEHLYSMKCKNVVPLYDLLLEAADAHRLHAPTSRGGASVEETDQSHLATAGSTSSHSLQKYYITGEAEGFPATA

SEQ ID NO: 251 - protein, 2028 aa, Artificial Sequence
  #Cas9 variant 2
APKKKRKVGIHGVPAATGAGDMRAANLWPSPLMIKRSKKNSLALSLTADQMVSALLDAEPPILYSEYDPTRPFSEASMMGLLTNLADRELVHMINWAKRVPGFVDLTLHDQVHLLECAWLEILMIGLVWRSMEHPVKLLFAPNLLLDRNQGKCVEGMVEIFDMLLATSSRFRMMNLQGEEFVCLKSIILLNSGVYTFLSSTLKSLEEKDHIHRVLDKITDTLIHLMAKAGLTLQQQHQRLAQLLLILSHIRHMSNKGMEHLYSMKCKNVVPLYDLLLEAADAHRLHAPTSRGGASVEETDQSHLATAGSTSSHSLQKYYITGEAEGFPATASGSEGADKKYSIGLDIGTNSVGWAVITDEYKVPSKKFKVLGNTDRHSIKKNLIGALLFDSGETAEATRLKRTARRRYTRRKNRICYLQEIFSNEMAKVDDSFFHRLEESFLVEEDKKHERHPIFGNIVDEVAYHEKYPTIYHLRKKLVDSTDKADLRLIYLALAHMIKFRGHFLIEGDLNPDNSDVDKLFIQLVQTYNQLFEENPINASGVDAKAILSARLSKSRRLENLIAQLPGEKKNGLFGNLIALSLGLTPNFKSNFDLAEDAKLQLSKDTYDDDLDNLLAQIGDQYADLFLAAKNLSDAILLSDILRVNTEITKAPLSASMIKRYDEHHQDLTLLKALVRQQLPEKYKEIFFDQSKNGYAGYIDGGASQEEFYKFIKPILEKMDGTEELLVKLNREDLLRKQRTFDNGSIPHQIHLGELHAILRRQEDFYPFLKDNREKIEKILTFRIPYYVGPLARGNSRFAWMTRKSEETITPWNFEEVVDKGASAQSFIERMTNFDKNLPNEKVLPKHSLLYEYFTVYNELTKVKYVTEGMRKPAFLSGEQKKAIVDLLFKTNRKVTVKQLKEDYFKKIECFDSVEISGVEDRFNASLGTYHDLLKIIKDKDFLDNEENEDILEDIVLTLTLFEDREMIEERLKTYAHLFDDKVMKQLKRRRYTGWGRLSRKLINGIRDKQSGKTILDFLKSDGFANRNFMQLIHDDSLTFKEDIQKAQVSGQGDSLHEHIANLAGSPAIKKGILQTVKVVDELVKVMGRHKPENIVIEMARENQTTQKGQKNSRERMKRIEEGIKELGSQILKEHPVENTQLQNEKLYLYYLQNGRDMYVDQELDINRLSDYDVDHIVPQSFLKDDSIDNKVLTRSDKNRGKSDNVPSEEVVKKMKNYWRQLLNAKLITQRKFDNLTKAERGGLSELDKAGFIKRQLVETRQITKHVAQILDSRMNTKYDENDKLIREVKVITLKSKLVSDFRKDFQFYKVREINNYHHAHDAYLNAVVGTALIKKYPKLESEFVYGDYKVYDVRKMIAKSEQEIGKATAKYFFYSNIMNFFKTEITLANGEIRKRPLIETNGETGEIVWDKGRDFATVRKVLSMPQVNIVKKTEVQTGGFSKESILPKRNSDKLIARKKDWDPKKYGGFDSPTVAYSVLVVAKVEKGKSKKLKSVKELLGITIMERSSFEKNPIDFLEAKGYKEVKKDLIIKLPKYSLFELENGRKRMLASAGELQKGNELALPSKYVNFLYLASHYEKLKGSPEDNEQKQLFVEQHKHYLDEIIEQISEFSKRVILADANLDKVLSAYNKHRDKPIREQAENIIHLFTLTNLGAPAAFKYFDTTIDRKRYTSTKEVLDATLIHQSITGLYETRIDLSQLGGDSRADPKKKRKVAGDMRAANLWPSPLMIKRSKKNSLALSLTADQMVSALLDAEPPILYSEYDPTRPFSEASMMGLLTNLADRELVHMINWAKRVPGFVDLTLHDQVHLLECAWLEILMIGLVWRSMEHPVKLLFAPNLLLDRNQGKCVEGMVEIFDMLLATSSRFRMMNLQGEEFVCLKSIILLNSGVYTFLSSTLKSLEEKDHIHRVLDKITDTLIHLMAKAGLTLQQQHQRLAQLLLILSHIRHMSNKGMEHLYSMKCKNVVPLYDLLLEAADAHRLHAPTSRGGASVEETDQSHLATAGSTSSHSLQKYYITGEAEGFPATA

SEQ ID NO: 252 - protein, 2030 aa, Artificial Sequence
  #Cas9 variant 3
APKKKRKVGIHGVPAATGAGDMRAANLWPSPLMIKRSKKNSLALSLTADQMVSALLDAEPPILYSEYDPTRPFSEASMMGLLTNLADRELVHMINWAKRVPGFVDLTLHDQVHLLECAWLEILMIGLVWRSMEHPVKLLFAPNLLLDRNQGKCVEGMVEIFDMLLATSSRFRMMNLQGEEFVCLKSIILLNSGVYTFLSSTLKSLEEKDHIHRVLDKITDTLIHLMAKAGLTLQQQHQRLAQLLLILSHIRHMSNKGMEHLYSMKCKNVVPLYDLLLEAADAHRLHAPTSRGGASVEETDQSHLATAGSTSSHSLQKYYITGEAEGFPATAGGSGGSGADKKYSIGLDIGTNSVGWAVITDEYKVPSKKFKVLGNTDRHSIKKNLIGALLFDSGETAEATRLKRTARRRYTRRKNRICYLQEIFSNEMAKVDDSFFHRLEESFLVEEDKKHERHPIFGNIVDEVAYHEKYPTIYHLRKKLVDSTDKADLRLIYLALAHMIKFRGHFLIEGDLNPDNSDVDKLFIQLVQTYNQLFEENPINASGVDAKAILSARLSKSRRLENLIAQLPGEKKNGLFGNLIALSLGLTPNFKSNFDLAEDAKLQLSKDTYDDDLDNLLAQIGDQYADLFLAAKNLSDAILLSDILRVNTEITKAPLSASMIKRYDEHHQDLTLLKALVRQQLPEKYKEIFFDQSKNGYAGYIDGGASQEEFYKFIKPILEKMDGTEELLVKLNREDLLRKQRTFDNGSIPHQIHLGELHAILRRQEDFYPFLKDNREKIEKILTFRIPYYVGPLARGNSRFAWMTRKSEETITPWNFEEVVDKGASAQSFIERMTNFDKNLPNEKVLPKHSLLYEYFTVYNELTKVKYVTEGMRKPAFLSGEQKKAIVDLLFKTNRKVTVKQLKEDYFKKIECFDSVEISGVEDRFNASLGTYHDLLKIIKDKDFLDNEENEDILEDIVLTLTLFEDREMIEERLKTYAHLFDDKVMKQLKRRRYTGWGRLSRKLINGIRDKQSGKTILDFLKSDGFANRNFMQLIHDDSLTFKEDIQKAQVSGQGDSLHEHIANLAGSPAIKKGILQTVKVVDELVKVMGRHKPENIVIEMARENQTTQKGQKNSRERMKRIEEGIKELGSQILKEHPVENTQLQNEKLYLYYLQNGRDMYVDQELDINRLSDYDVDHIVPQSFLKDDSIDNKVLTRSDKNRGKSDNVPSEEVVKKMKNYWRQLLNAKLITQRKFDNLTKAERGGLSELDKAGFIKRQLVETRQITKHVAQILDSRMNTKYDENDKLIREVKVITLKSKLVSDFRKDFQFYKVREINNYHHAHDAYLNAVVGTALIKKYPKLESEFVYGDYKVYDVRKMIAKSEQEIGKATAKYFFYSNIMNFFKTEITLANGEIRKRPLIETNGETGEIVWDKGRDFATVRKVLSMPQVNIVKKTEVQTGGFSKESILPKRNSDKLIARKKDWDPKKYGGFDSPTVAYSVLVVAKVEKGKSKKLKSVKELLGITIMERSSFEKNPIDFLEAKGYKEVKKDLIIKLPKYSLFELENGRKRMLASAGELQKGNELALPSKYVNFLYLASHYEKLKGSPEDNEQKQLFVEQHKHYLDEIIEQISEFSKRVILADANLDKVLSAYNKHRDKPIREQAENIIHLFTLTNLGAPAAFKYFDTTIDRKRYTSTKEVLDATLIHQSITGLYETRIDLSQLGGDSRADPKKKRKVAGDMRAANLWPSPLMIKRSKKNSLALSLTADQMVSALLDAEPPILYSEYDPTRPFSEASMMGLLTNLADRELVHMINWAKRVPGFVDLTLHDQVHLLECAWLEILMIGLVWRSMEHPVKLLFAPNLLLDRNQGKCVEGMVEIFDMLLATSSRFRMMNLQGEEFVCLKSIILLNSGVYTFLSSTLKSLEEKDHIHRVLDKITDTLIHLMAKAGLTLQQQHQRLAQLLLILSHIRHMSNKGMEHLYSMKCKNVVPLYDLLLEAADAHRLHAPTSRGGASVEETDQSHLATAGSTSSHSLQKYYITGEAEGFPATA

SEQ ID NO: 253 - protein, 2035 aa, Artificial Sequence
  #Cas9 variant 4
APKKKRKVGIHGVPAATGAGDMRAANLWPSPLMIKRSKKNSLALSLTADQMVSALLDAEPPILYSEYDPTRPFSEASMMGLLTNLADRELVHMINWAKRVPGFVDLTLHDQVHLLECAWLEILMIGLVWRSMEHPVKLLFAPNLLLDRNQGKCVEGMVEIFDMLLATSSRFRMMNLQGEEFVCLKSIILLNSGVYTFLSSTLKSLEEKDHIHRVLDKITDTLIHLMAKAGLTLQQQHQRLAQLLLILSHIRHMSNKGMEHLYSMKCKNVVPLYDLLLEAADAHRLHAPTSRGGASVEETDQSHLATAGSTSSHSLQKYYITGEAEGFPATAGTSESATPESGGADKKYSIGLDIGTNSVGWAVITDEYKVPSKKFKVLGNTDRHSIKKNLIGALLFDSGETAEATRLKRTARRRYTRRKNRICYLQEIFSNEMAKVDDSFFHRLEESFLVEEDKKHERHPIFGNIVDEVAYHEKYPTIYHLRKKLVDSTDKADLRLIYLALAHMIKFRGHFLIEGDLNPDNSDVDKLFIQLVQTYNQLFEENPINASGVDAKAILSARLSKSRRLENLIAQLPGEKKNGLFGNLIALSLGLTPNFKSNFDLAEDAKLQLSKDTYDDDLDNLLAQIGDQYADLFLAAKNLSDAILLSDILRVNTEITKAPLSASMIKRYDEHHQDLTLLKALVRQQLPEKYKEIFFDQSKNGYAGYIDGGASQEEFYKFIKPILEKMDGTEELLVKLNREDLLRKQRTFDNGSIPHQIHLGELHAILRRQEDFYPFLKDNREKIEKILTFRIPYYVGPLARGNSRFAWMTRKSEETITPWNFEEVVDKGASAQSFIERMTNFDKNLPNEKVLPKHSLLYEYFTVYNELTKVKYVTEGMRKPAFLSGEQKKAIVDLLFKTNRKVTVKQLKEDYFKKIECFDSVEISGVEDRFNASLGTYHDLLKIIKDKDFLDNEENEDILEDIVLTLTLFEDREMIEERLKTYAHLFDDKVMKQLKRRRYTGWGRLSRKLINGIRDKQSGKTILDFLKSDGFANRNFMQLIHDDSLTFKEDIQKAQVSGQGDSLHEHIANLAGSPAIKKGILQTVKVVDELVKVMGRHKPENIVIEMARENQTTQKGQKNSRERMKRIEEGIKELGSQILKEHPVENTQLQNEKLYLYYLQNGRDMYVDQELDINRLSDYDVDHIVPQSFLKDDSIDNKVLTRSDKNRGKSDNVPSEEVVKKMKNYWRQLLNAKLITQRKFDNLTKAERGGLSELDKAGFIKRQLVETRQITKHVAQILDSRMNTKYDENDKLIREVKVITLKSKLVSDFRKDFQFYKVREINNYHHAHDAYLNAVVGTALIKKYPKLESEFVYGDYKVYDVRKMIAKSEQEIGKATAKYFFYSNIMNFFKTEITLANGEIRKRPLIETNGETGEIVWDKGRDFATVRKVLSMPQVNIVKKTEVQTGGFSKESILPKRNSDKLIARKKDWDPKKYGGFDSPTVAYSVLVVAKVEKGKSKKLKSVKELLGITIMERSSFEKNPIDFLEAKGYKEVKKDLIIKLPKYSLFELENGRKRMLASAGELQKGNELALPSKYVNFLYLASHYEKLKGSPEDNEQKQLFVEQHKHYLDEIIEQISEFSKRVILADANLDKVLSAYNKHRDKPIREQAENIIHLFTLTNLGAPAAFKYFDTTIDRKRYTSTKEVLDATLIHQSITGLYETRIDLSQLGGDSRADPKKKRKVAGDMRAANLWPSPLMIKRSKKNSLALSLTADQMVSALLDAEPPILYSEYDPTRPFSEASMMGLLTNLADRELVHMINWAKRVPGFVDLTLHDQVHLLECAWLEILMIGLVWRSMEHPVKLLFAPNLLLDRNQGKCVEGMVEIFDMLLATSSRFRMMNLQGEEFVCLKSIILLNSGVYTFLSSTLKSLEEKDHIHRVLDKITDTLIHLMAKAGLTLQQQHQRLAQLLLILSHIRHMSNKGMEHLYSMKCKNVVPLYDLLLEAADAHRLHAPTSRGGASVEETDQSHLATAGSTSSHSLQKYYITGEAEGFPATA

SEQ ID NO: 254 - protein, 2032 aa, Artificial Sequence
  #Cas9 variant 5
APKKKRKVGIHGVPAATGAGDMRAANLWPSPLMIKRSKKNSLALSLTADQMVSALLDAEPPILYSEYDPTRPFSEASMMGLLTNLADRELVHMINWAKRVPGFVDLTLHDQVHLLECAWLEILMIGLVWRSMEHPVKLLFAPNLLLDRNQGKCVEGMVEIFDMLLATSSRFRMMNLQGEEFVCLKSIILLNSGVYTFLSSTLKSLEEKDHIHRVLDKITDTLIHLMAKAGLTLQQQHQRLAQLLLILSHIRHMSNKGMEHLYSMKCKNVVPLYDLLLEAADAHRLHAPTSRGGASVEETDQSHLATAGSTSSHSLQKYYITGEAEGFPATASGSETPGTGADKKYSIGLDIGTNSVGWAVITDEYKVPSKKFKVLGNTDRHSIKKNLIGALLFDSGETAEATRLKRTARRRYTRRKNRICYLQEIFSNEMAKVDDSFFHRLEESFLVEEDKKHERHPIFGNIVDEVAYHEKYPTIYHLRKKLVDSTDKADLRLIYLALAHMIKFRGHFLIEGDLNPDNSDVDKLFIQLVQTYNQLFEENPINASGVDAKAILSARLSKSRRLENLIAQLPGEKKNGLFGNLIALSLGLTPNFKSNFDLAEDAKLQLSKDTYDDDLDNLLAQIGDQYADLFLAAKNLSDAILLSDILRVNTEITKAPLSASMIKRYDEHHQDLTLLKALVRQQLPEKYKEIFFDQSKNGYAGYIDGGASQEEFYKFIKPILEKMDGTEELLVKLNREDLLRKQRTFDNGSIPHQIHLGELHAILRRQEDFYPFLKDNREKIEKILTFRIPYYVGPLARGNSRFAWMTRKSEETITPWNFEEVVDKGASAQSFIERMTNFDKNLPNEKVLPKHSLLYEYFTVYNELTKVKYVTEGMRKPAFLSGEQKKAIVDLLFKTNRKVTVKQLKEDYFKKIECFDSVEISGVEDRFNASLGTYHDLLKIIKDKDFLDNEENEDILEDIVLTLTLFEDREMIEERLKTYAHLFDDKVMKQLKRRRYTGWGRLSRKLINGIRDKQSGKTILDFLKSDGFANRNFMQLIHDDSLTFKEDIQKAQVSGQGDSLHEHIANLAGSPAIKKGILQTVKVVDELVKVMGRHKPENIVIEMARENQTTQKGQKNSRERMKRIEEGIKELGSQILKEHPVENTQLQNEKLYLYYLQNGRDMYVDQELDINRLSDYDVDHIVPQSFLKDDSIDNKVLTRSDKNRGKSDNVPSEEVVKKMKNYWRQLLNAKLITQRKFDNLTKAERGGLSELDKAGFIKRQLVETRQITKHVAQILDSRMNTKYDENDKLIREVKVITLKSKLVSDFRKDFQFYKVREINNYHHAHDAYLNAVVGTALIKKYPKLESEFVYGDYKVYDVRKMIAKSEQEIGKATAKYFFYSNIMNFFKTEITLANGEIRKRPLIETNGETGEIVWDKGRDFATVRKVLSMPQVNIVKKTEVQTGGFSKESILPKRNSDKLIARKKDWDPKKYGGFDSPTVAYSVLVVAKVEKGKSKKLKSVKELLGITIMERSSFEKNPIDFLEAKGYKEVKKDLIIKLPKYSLFELENGRKRMLASAGELQKGNELALPSKYVNFLYLASHYEKLKGSPEDNEQKQLFVEQHKHYLDEIIEQISEFSKRVILADANLDKVLSAYNKHRDKPIREQAENIIHLFTLTNLGAPAAFKYFDTTIDRKRYTSTKEVLDATLIHQSITGLYETRIDLSQLGGDSRADPKKKRKVAGDMRAANLWPSPLMIKRSKKNSLALSLTADQMVSALLDAEPPILYSEYDPTRPFSEASMMGLLTNLADRELVHMINWAKRVPGFVDLTLHDQVHLLECAWLEILMIGLVWRSMEHPVKLLFAPNLLLDRNQGKCVEGMVEIFDMLLATSSRFRMMNLQGEEFVCLKSIILLNSGVYTFLSSTLKSLEEKDHIHRVLDKITDTLIHLMAKAGLTLQQQHQRLAQLLLILSHIRHMSNKGMEHLYSMKCKNVVPLYDLLLEAADAHRLHAPTSRGGASVEETDQSHLATAGSTSSHSLQKYYITGEAEGFPATA

SEQ ID NO: 255 - protein, 2032 aa, Artificial Sequence
  #Cas9 variant 6
APKKKRKVGIHGVPAATGAGDMRAANLWPSPLMIKRSKKNSLALSLTADQMVSALLDAEPPILYSEYDPTRPFSEASMMGLLTNLADRELVHMINWAKRVPGFVDLTLHDQVHLLECAWLEILMIGLVWRSMEHPVKLLFAPNLLLDRNQGKCVEGMVEIFDMLLATSSRFRMMNLQGEEFVCLKSIILLNSGVYTFLSSTLKSLEEKDHIHRVLDKITDTLIHLMAKAGLTLQQQHQRLAQLLLILSHIRHMSNKGMEHLYSMKCKNVVPLYDLLLEAADAHRLHAPTSRGGASVEETDQSHLATAGSTSSHSLQKYYITGEAEGFPATASESATPESGADKKYSIGLDIGTNSVGWAVITDEYKVPSKKFKVLGNTDRHSIKKNLIGALLFDSGETAEATRLKRTARRRYTRRKNRICYLQEIFSNEMAKVDDSFFHRLEESFLVEEDKKHERHPIFGNIVDEVAYHEKYPTIYHLRKKLVDSTDKADLRLIYLALAHMIKFRGHFLIEGDLNPDNSDVDKLFIQLVQTYNQLFEENPINASGVDAKAILSARLSKSRRLENLIAQLPGEKKNGLFGNLIALSLGLTPNFKSNFDLAEDAKLQLSKDTYDDDLDNLLAQIGDQYADLFLAAKNLSDAILLSDILRVNTEITKAPLSASMIKRYDEHHQDLTLLKALVRQQLPEKYKEIFFDQSKNGYAGYIDGGASQEEFYKFIKPILEKMDGTEELLVKLNREDLLRKQRTFDNGSIPHQIHLGELHAILRRQEDFYPFLKDNREKIEKILTFRIPYYVGPLARGNSRFAWMTRKSEETITPWNFEEVVDKGASAQSFIERMTNFDKNLPNEKVLPKHSLLYEYFTVYNELTKVKYVTEGMRKPAFLSGEQKKAIVDLLFKTNRKVTVKQLKEDYFKKIECFDSVEISGVEDRFNASLGTYHDLLKIIKDKDFLDNEENEDILEDIVLTLTLFEDREMIEERLKTYAHLFDDKVMKQLKRRRYTGWGRLSRKLINGIRDKQSGKTILDFLKSDGFANRNFMQLIHDDSLTFKEDIQKAQVSGQGDSLHEHIANLAGSPAIKKGILQTVKVVDELVKVMGRHKPENIVIEMARENQTTQKGQKNSRERMKRIEEGIKELGSQILKEHPVENTQLQNEKLYLYYLQNGRDMYVDQELDINRLSDYDVDHIVPQSFLKDDSIDNKVLTRSDKNRGKSDNVPSEEVVKKMKNYWRQLLNAKLITQRKFDNLTKAERGGLSELDKAGFIKRQLVETRQITKHVAQILDSRMNTKYDENDKLIREVKVITLKSKLVSDFRKDFQFYKVREINNYHHAHDAYLNAVVGTALIKKYPKLESEFVYGDYKVYDVRKMIAKSEQEIGKATAKYFFYSNIMNFFKTEITLANGEIRKRPLIETNGETGEIVWDKGRDFATVRKVLSMPQVNIVKKTEVQTGGFSKESILPKRNSDKLIARKKDWDPKKYGGFDSPTVAYSVLVVAKVEKGKSKKLKSVKELLGITIMERSSFEKNPIDFLEAKGYKEVKKDLIIKLPKYSLFELENGRKRMLASAGELQKGNELALPSKYVNFLYLASHYEKLKGSPEDNEQKQLFVEQHKHYLDEIIEQISEFSKRVILADANLDKVLSAYNKHRDKPIREQAENIIHLFTLTNLGAPAAFKYFDTTIDRKRYTSTKEVLDATLIHQSITGLYETRIDLSQLGGDSRADPKKKRKVAGDMRAANLWPSPLMIKRSKKNSLALSLTADQMVSALLDAEPPILYSEYDPTRPFSEASMMGLLTNLADRELVHMINWAKRVPGFVDLTLHDQVHLLECAWLEILMIGLVWRSMEHPVKLLFAPNLLLDRNQGKCVEGMVEIFDMLLATSSRFRMMNLQGEEFVCLKSIILLNSGVYTFLSSTLKSLEEKDHIHRVLDKITDTLIHLMAKAGLTLQQQHQRLAQLLLILSHIRHMSNKGMEHLYSMKCKNVVPLYDLLLEAADAHRLHAPTSRGGASVEETDQSHLATAGSTSSHSLQKYYITGEAEGFPATA

SEQ ID NO: 256 - protein, 2035 aa, Artificial Sequence
  #Cas9 variant 7
APKKKRKVGIHGVPAATGGGSAGDMRAANLWPSPLMIKRSKKNSLALSLTADQMVSALLDAEPPILYSEYDPTRPFSEASMMGLLTNLADRELVHMINWAKRVPGFVDLTLHDQVHLLECAWLEILMIGLVWRSMEHPVKLLFAPNLLLDRNQGKCVEGMVEIFDMLLATSSRFRMMNLQGEEFVCLKSIILLNSGVYTFLSSTLKSLEEKDHIHRVLDKITDTLIHLMAKAGLTLQQQHQRLAQLLLILSHIRHMSNKGMEHLYSMKCKNVVPLYDLLLEAADAHRLHAPTSRGGASVEETDQSHLATAGSTSSHSLQKYYITGEAEGFPATASGSETPGTGADKKYSIGLDIGTNSVGWAVITDEYKVPSKKFKVLGNTDRHSIKKNLIGALLFDSGETAEATRLKRTARRRYTRRKNRICYLQEIFSNEMAKVDDSFFHRLEESFLVEEDKKHERHPIFGNIVDEVAYHEKYPTIYHLRKKLVDSTDKADLRLIYLALAHMIKFRGHFLIEGDLNPDNSDVDKLFIQLVQTYNQLFEENPINASGVDAKAILSARLSKSRRLENLIAQLPGEKKNGLFGNLIALSLGLTPNFKSNFDLAEDAKLQLSKDTYDDDLDNLLAQIGDQYADLFLAAKNLSDAILLSDILRVNTEITKAPLSASMIKRYDEHHQDLTLLKALVRQQLPEKYKEIFFDQSKNGYAGYIDGGASQEEFYKFIKPILEKMDGTEELLVKLNREDLLRKQRTFDNGSIPHQIHLGELHAILRRQEDFYPFLKDNREKIEKILTFRIPYYVGPLARGNSRFAWMTRKSEETITPWNFEEVVDKGASAQSFIERMTNFDKNLPNEKVLPKHSLLYEYFTVYNELTKVKYVTEGMRKPAFLSGEQKKAIVDLLFKTNRKVTVKQLKEDYFKKIECFDSVEISGVEDRFNASLGTYHDLLKIIKDKDFLDNEENEDILEDIVLTLTLFEDREMIEERLKTYAHLFDDKVMKQLKRRRYTGWGRLSRKLINGIRDKQSGKTILDFLKSDGFANRNFMQLIHDDSLTFKEDIQKAQVSGQGDSLHEHIANLAGSPAIKKGILQTVKVVDELVKVMGRHKPENIVIEMARENQTTQKGQKNSRERMKRIEEGIKELGSQILKEHPVENTQLQNEKLYLYYLQNGRDMYVDQELDINRLSDYDVDHIVPQSFLKDDSIDNKVLTRSDKNRGKSDNVPSEEVVKKMKNYWRQLLNAKLITQRKFDNLTKAERGGLSELDKAGFIKRQLVETRQITKHVAQILDSRMNTKYDENDKLIREVKVITLKSKLVSDFRKDFQFYKVREINNYHHAHDAYLNAVVGTALIKKYPKLESEFVYGDYKVYDVRKMIAKSEQEIGKATAKYFFYSNIMNFFKTEITLANGEIRKRPLIETNGETGEIVWDKGRDFATVRKVLSMPQVNIVKKTEVQTGGFSKESILPKRNSDKLIARKKDWDPKKYGGFDSPTVAYSVLVVAKVEKGKSKKLKSVKELLGITIMERSSFEKNPIDFLEAKGYKEVKKDLIIKLPKYSLFELENGRKRMLASAGELQKGNELALPSKYVNFLYLASHYEKLKGSPEDNEQKQLFVEQHKHYLDEIIEQISEFSKRVILADANLDKVLSAYNKHRDKPIREQAENIIHLFTLTNLGAPAAFKYFDTTIDRKRYTSTKEVLDATLIHQSITGLYETRIDLSQLGGDSRADPKKKRKVAGDMRAANLWPSPLMIKRSKKNSLALSLTADQMVSALLDAEPPILYSEYDPTRPFSEASMMGLLTNLADRELVHMINWAKRVPGFVDLTLHDQVHLLECAWLEILMIGLVWRSMEHPVKLLFAPNLLLDRNQGKCVEGMVEIFDMLLATSSRFRMMNLQGEEFVCLKSIILLNSGVYTFLSSTLKSLEEKDHIHRVLDKITDTLIHLMAKAGLTLQQQHQRLAQLLLILSHIRHMSNKGMEHLYSMKCKNVVPLYDLLLEAADAHRLHAPTSRGGASVEETDQSHLATAGSTSSHSLQKYYITGEAEGFPATA

SEQ ID NO: 257 - protein, 2037 aa, Artificial Sequence
  #Cas9 variant 8
APKKKRKVGIHGVPAATGGGSAGDMRAANLWPSPLMIKRSKKNSLALSLTADQMVSALLDAEPPILYSEYDPTRPFSEASMMGLLTNLADRELVHMINWAKRVPGFVDLTLHDQVHLLECAWLEILMIGLVWRSMEHPVKLLFAPNLLLDRNQGKCVEGMVEIFDMLLATSSRFRMMNLQGEEFVCLKSIILLNSGVYTFLSSTLKSLEEKDHIHRVLDKITDTLIHLMAKAGLTLQQQHQRLAQLLLILSHIRHMSNKGMEHLYSMKCKNVVPLYDLLLEAADAHRLHAPTSRGGASVEETDQSHLATAGSTSSHSLQKYYITGEAEGFPATASGSETPGTPGGADKKYSIGLDIGTNSVGWAVITDEYKVPSKKFKVLGNTDRHSIKKNLIGALLFDSGETAEATRLKRTARRRYTRRKNRICYLQEIFSNEMAKVDDSFFHRLEESFLVEEDKKHERHPIFGNIVDEVAYHEKYPTIYHLRKKLVDSTDKADLRLIYLALAHMIKFRGHFLIEGDLNPDNSDVDKLFIQLVQTYNQLFEENPINASGVDAKAILSARLSKSRRLENLIAQLPGEKKNGLFGNLIALSLGLTPNFKSNFDLAEDAKLQLSKDTYDDDLDNLLAQIGDQYADLFLAAKNLSDAILLSDILRVNTEITKAPLSASMIKRYDEHHQDLTLLKALVRQQLPEKYKEIFFDQSKNGYAGYIDGGASQEEFYKFIKPILEKMDGTEELLVKLNREDLLRKQRTFDNGSIPHQIHLGELHAILRRQEDFYPFLKDNREKIEKILTFRIPYYVGPLARGNSRFAWMTRKSEETITPWNFEEVVDKGASAQSFIERMTNFDKNLPNEKVLPKHSLLYEYFTVYNELTKVKYVTEGMRKPAFLSGEQKKAIVDLLFKTNRKVTVKQLKEDYFKKIECFDSVEISGVEDRFNASLGTYHDLLKIIKDKDFLDNEENEDILEDIVLTLTLFEDREMIEERLKTYAHLFDDKVMKQLKRRRYTGWGRLSRKLINGIRDKQSGKTILDFLKSDGFANRNFMQLIHDDSLTFKEDIQKAQVSGQGDSLHEHIANLAGSPAIKKGILQTVKVVDELVKVMGRHKPENIVIEMARENQTTQKGQKNSRERMKRIEEGIKELGSQILKEHPVENTQLQNEKLYLYYLQNGRDMYVDQELDINRLSDYDVDHIVPQSFLKDDSIDNKVLTRSDKNRGKSDNVPSEEVVKKMKNYWRQLLNAKLITQRKFDNLTKAERGGLSELDKAGFIKRQLVETRQITKHVAQILDSRMNTKYDENDKLIREVKVITLKSKLVSDFRKDFQFYKVREINNYHHAHDAYLNAVVGTALIKKYPKLESEFVYGDYKVYDVRKMIAKSEQEIGKATAKYFFYSNIMNFFKTEITLANGEIRKRPLIETNGETGEIVWDKGRDFATVRKVLSMPQVNIVKKTEVQTGGFSKESILPKRNSDKLIARKKDWDPKKYGGFDSPTVAYSVLVVAKVEKGKSKKLKSVKELLGITIMERSSFEKNPIDFLEAKGYKEVKKDLIIKLPKYSLFELENGRKRMLASAGELQKGNELALPSKYVNFLYLASHYEKLKGSPEDNEQKQLFVEQHKHYLDEIIEQISEFSKRVILADANLDKVLSAYNKHRDKPIREQAENIIHLFTLTNLGAPAAFKYFDTTIDRKRYTSTKEVLDATLIHQSITGLYETRIDLSQLGGDSRADPKKKRKVAGDMRAANLWPSPLMIKRSKKNSLALSLTADQMVSALLDAEPPILYSEYDPTRPFSEASMMGLLTNLADRELVHMINWAKRVPGFVDLTLHDQVHLLECAWLEILMIGLVWRSMEHPVKLLFAPNLLLDRNQGKCVEGMVEIFDMLLATSSRFRMMNLQGEEFVCLKSIILLNSGVYTFLSSTLKSLEEKDHIHRVLDKITDTLIHLMAKAGLTLQQQHQRLAQLLLILSHIRHMSNKGMEHLYSMKCKNVVPLYDLLLEAADAHRLHAPTSRGGASVEETDQSHLATAGSTSSHSLQKYYITGEAEGFPATA

SEQ ID NO: 258 - protein, 2031 aa, Artificial Sequence
  #Cas9 variant 9
APKKKRKVGIHGVPAATGAGDMRAANLWPSPLMIKRSKKNSLALSLTADQMVSALLDAEPPILYSEYDPTRPFSEASMMGLLTNLADRELVHMINWAKRVPGFVDLTLHDQVHLLECAWLEILMIGLVWRSMEHPVKLLFAPNLLLDRNQGKCVEGMVEIFDMLLATSSRFRMMNLQGEEFVCLKSIILLNSGVYTFLSSTLKSLEEKDHIHRVLDKITDTLIHLMAKAGLTLQQQHQRLAQLLLILSHIRHMSNKGMEHLYSMKCKNVVPLYDLLLEAADAHRLHAPTSRGGASVEETDQSHLATAGSTSSHSLQKYYITGEAEGFPATAGASGSKTPGDKKYSIGLDIGTNSVGWAVITDEYKVPSKKFKVLGNTDRHSIKKNLIGALLFDSGETAEATRLKRTARRRYTRRKNRICYLQEIFSNEMAKVDDSFFHRLEESFLVEEDKKHERHPIFGNIVDEVAYHEKYPTIYHLRKKLVDSTDKADLRLIYLALAHMIKFRGHFLIEGDLNPDNSDVDKLFIQLVQTYNQLFEENPINASGVDAKAILSARLSKSRRLENLIAQLPGEKKNGLFGNLIALSLGLTPNFKSNFDLAEDAKLQLSKDTYDDDLDNLLAQIGDQYADLFLAAKNLSDAILLSDILRVNTEITKAPLSASMIKRYDEHHQDLTLLKALVRQQLPEKYKEIFFDQSKNGYAGYIDGGASQEEFYKFIKPILEKMDGTEELLVKLNREDLLRKQRTFDNGSIPHQIHLGELHAILRRQEDFYPFLKDNREKIEKILTFRIPYYVGPLARGNSRFAWMTRKSEETITPWNFEEVVDKGASAQSFIERMTNFDKNLPNEKVLPKHSLLYEYFTVYNELTKVKYVTEGMRKPAFLSGEQKKAIVDLLFKTNRKVTVKQLKEDYFKKIECFDSVEISGVEDRFNASLGTYHDLLKIIKDKDFLDNEENEDILEDIVLTLTLFEDREMIEERLKTYAHLFDDKVMKQLKRRRYTGWGRLSRKLINGIRDKQSGKTILDFLKSDGFANRNFMQLIHDDSLTFKEDIQKAQVSGQGDSLHEHIANLAGSPAIKKGILQTVKVVDELVKVMGRHKPENIVIEMARENQTTQKGQKNSRERMKRIEEGIKELGSQILKEHPVENTQLQNEKLYLYYLQNGRDMYVDQELDINRLSDYDVDHIVPQSFLKDDSIDNKVLTRSDKNRGKSDNVPSEEVVKKMKNYWRQLLNAKLITQRKFDNLTKAERGGLSELDKAGFIKRQLVETRQITKHVAQILDSRMNTKYDENDKLIREVKVITLKSKLVSDFRKDFQFYKVREINNYHHAHDAYLNAVVGTALIKKYPKLESEFVYGDYKVYDVRKMIAKSEQEIGKATAKYFFYSNIMNFFKTEITLANGEIRKRPLIETNGETGEIVWDKGRDFATVRKVLSMPQVNIVKKTEVQTGGFSKESILPKRNSDKLIARKKDWDPKKYGGFDSPTVAYSVLVVAKVEKGKSKKLKSVKELLGITIMERSSFEKNPIDFLEAKGYKEVKKDLIIKLPKYSLFELENGRKRMLASAGELQKGNELALPSKYVNFLYLASHYEKLKGSPEDNEQKQLFVEQHKHYLDEIIEQISEFSKRVILADANLDKVLSAYNKHRDKPIREQAENIIHLFTLTNLGAPAAFKYFDTTIDRKRYTSTKEVLDATLIHQSITGLYETRIDLSQLGGDSRADPKKKRKVAGDMRAANLWPSPLMIKRSKKNSLALSLTADQMVSALLDAEPPILYSEYDPTRPFSEASMMGLLTNLADRELVHMINWAKRVPGFVDLTLHDQVHLLECAWLEILMIGLVWRSMEHPVKLLFAPNLLLDRNQGKCVEGMVEIFDMLLATSSRFRMMNLQGEEFVCLKSIILLNSGVYTFLSSTLKSLEEKDHIHRVLDKITDTLIHLMAKAGLTLQQQHQRLAQLLLILSHIRHMSNKGMEHLYSMKCKNVVPLYDLLLEAADAHRLHAPTSRGGASVEETDQSHLATAGSTSSHSLQKYYITGEAEGFPATA

SEQ ID NO: 259 - protein, 2028 aa, Artificial Sequence
  #Cas9 variant 10
APKKKRKVGIHGVPAATGAGDMRAANLWPSPLMIKRSKKNSLALSLTADQMVSALLDAEPPILYSEYDPTRPFSEASMMGLLTNLADRELVHMINWAKRVPGFVDLTLHDQVHLLECAWLEILMIGLVWRSMEHPVKLLFAPNLLLDRNQGKCVEGMVEIFDMLLATSSRFRMMNLQGEEFVCLKSIILLNSGVYTFLSSTLKSLEEKDHIHRVLDKITDTLIHLMAKAGLTLQQQHQRLAQLLLILSHIRHMSNKGMEHLYSMKCKNVVPLYDLLLEAADAHRLHAPTSRGGASVEETDQSHLATAGSTSSHSLQKYYITGEAEGFPATATPESGADKKYSIGLDIGTNSVGWAVITDEYKVPSKKFKVLGNTDRHSIKKNLIGALLFDSGETAEATRLKRTARRRYTRRKNRICYLQEIFSNEMAKVDDSFFHRLEESFLVEEDKKHERHPIFGNIVDEVAYHEKYPTIYHLRKKLVDSTDKADLRLIYLALAHMIKFRGHFLIEGDLNPDNSDVDKLFIQLVQTYNQLFEENPINASGVDAKAILSARLSKSRRLENLIAQLPGEKKNGLFGNLIALSLGLTPNFKSNFDLAEDAKLQLSKDTYDDDLDNLLAQIGDQYADLFLAAKNLSDAILLSDILRVNTEITKAPLSASMIKRYDEHHQDLTLLKALVRQQLPEKYKEIFFDQSKNGYAGYIDGGASQEEFYKFIKPILEKMDGTEELLVKLNREDLLRKQRTFDNGSIPHQIHLGELHAILRRQEDFYPFLKDNREKIEKILTFRIPYYVGPLARGNSRFAWMTRKSEETITPWNFEEVVDKGASAQSFIERMTNFDKNLPNEKVLPKHSLLYEYFTVYNELTKVKYVTEGMRKPAFLSGEQKKAIVDLLFKTNRKVTVKQLKEDYFKKIECFDSVEISGVEDRFNASLGTYHDLLKIIKDKDFLDNEENEDILEDIVLTLTLFEDREMIEERLKTYAHLFDDKVMKQLKRRRYTGWGRLSRKLINGIRDKQSGKTILDFLKSDGFANRNFMQLIHDDSLTFKEDIQKAQVSGQGDSLHEHIANLAGSPAIKKGILQTVKVVDELVKVMGRHKPENIVIEMARENQTTQKGQKNSRERMKRIEEGIKELGSQILKEHPVENTQLQNEKLYLYYLQNGRDMYVDQELDINRLSDYDVDHIVPQSFLKDDSIDNKVLTRSDKNRGKSDNVPSEEVVKKMKNYWRQLLNAKLITQRKFDNLTKAERGGLSELDKAGFIKRQLVETRQITKHVAQILDSRMNTKYDENDKLIREVKVITLKSKLVSDFRKDFQFYKVREINNYHHAHDAYLNAVVGTALIKKYPKLESEFVYGDYKVYDVRKMIAKSEQEIGKATAKYFFYSNIMNFFKTEITLANGEIRKRPLIETNGETGEIVWDKGRDFATVRKVLSMPQVNIVKKTEVQTGGFSKESILPKRNSDKLIARKKDWDPKKYGGFDSPTVAYSVLVVAKVEKGKSKKLKSVKELLGITIMERSSFEKNPIDFLEAKGYKEVKKDLIIKLPKYSLFELENGRKRMLASAGELQKGNELALPSKYVNFLYLASHYEKLKGSPEDNEQKQLFVEQHKHYLDEIIEQISEFSKRVILADANLDKVLSAYNKHRDKPIREQAENIIHLFTLTNLGAPAAFKYFDTTIDRKRYTSTKEVLDATLIHQSITGLYETRIDLSQLGGDSRADPKKKRKVAGDMRAANLWPSPLMIKRSKKNSLALSLTADQMVSALLDAEPPILYSEYDPTRPFSEASMMGLLTNLADRELVHMINWAKRVPGFVDLTLHDQVHLLECAWLEILMIGLVWRSMEHPVKLLFAPNLLLDRNQGKCVEGMVEIFDMLLATSSRFRMMNLQGEEFVCLKSIILLNSGVYTFLSSTLKSLEEKDHIHRVLDKITDTLIHLMAKAGLTLQQQHQRLAQLLLILSHIRHMSNKGMEHLYSMKCKNVVPLYDLLLEAADAHRLHAPTSRGGASVEETDQSHLATAGSTSSHSLQKYYITGEAEGFPATA

SEQ ID NO: 260 - protein, 2028 aa, Artificial Sequence
  #Cas9 variant 11
APKKKRKVGIHGVPAATGPGGSAGDMRAANLWPSPLMIKRSKKNSLALSLTADQMVSALLDAEPPILYSEYDPTRPFSEASMMGLLTNLADRELVHMINWAKRVPGFVDLTLHDQVHLLECAWLEILMIGLVWRSMEHPVKLLFAPNLLLDRNQGKCVEGMVEIFDMLLATSSRFRMMNLQGEEFVCLKSIILLNSGVYTFLSSTLKSLEEKDHIHRVLDKITDTLIHLMAKAGLTLQQQHQRLAQLLLILSHIRHMSNKGMEHLYSMKCKNVVPLYDLLLEAADAHRLHAPTSRGGASVEETDQSHLATAGSTSSHSLQKYYITGEAEGFPATAGADKKYSIGLDIGTNSVGWAVITDEYKVPSKKFKVLGNTDRHSIKKNLIGALLFDSGETAEATRLKRTARRRYTRRKNRICYLQEIFSNEMAKVDDSFFHRLEESFLVEEDKKHERHPIFGNIVDEVAYHEKYPTIYHLRKKLVDSTDKADLRLIYLALAHMIKFRGHFLIEGDLNPDNSDVDKLFIQLVQTYNQLFEENPINASGVDAKAILSARLSKSRRLENLIAQLPGEKKNGLFGNLIALSLGLTPNFKSNFDLAEDAKLQLSKDTYDDDLDNLLAQIGDQYADLFLAAKNLSDAILLSDILRVNTEITKAPLSASMIKRYDEHHQDLTLLKALVRQQLPEKYKEIFFDQSKNGYAGYIDGGASQEEFYKFIKPILEKMDGTEELLVKLNREDLLRKQRTFDNGSIPHQIHLGELHAILRRQEDFYPFLKDNREKIEKILTFRIPYYVGPLARGNSRFAWMTRKSEETITPWNFEEVVDKGASAQSFIERMTNFDKNLPNEKVLPKHSLLYEYFTVYNELTKVKYVTEGMRKPAFLSGEQKKAIVDLLFKTNRKVTVKQLKEDYFKKIECFDSVEISGVEDRFNASLGTYHDLLKIIKDKDFLDNEENEDILEDIVLTLTLFEDREMIEERLKTYAHLFDDKVMKQLKRRRYTGWGRLSRKLINGIRDKQSGKTILDFLKSDGFANRNFMQLIHDDSLTFKEDIQKAQVSGQGDSLHEHIANLAGSPAIKKGILQTVKVVDELVKVMGRHKPENIVIEMARENQTTQKGQKNSRERMKRIEEGIKELGSQILKEHPVENTQLQNEKLYLYYLQNGRDMYVDQELDINRLSDYDVDHIVPQSFLKDDSIDNKVLTRSDKNRGKSDNVPSEEVVKKMKNYWRQLLNAKLITQRKFDNLTKAERGGLSELDKAGFIKRQLVETRQITKHVAQILDSRMNTKYDENDKLIREVKVITLKSKLVSDFRKDFQFYKVREINNYHHAHDAYLNAVVGTALIKKYPKLESEFVYGDYKVYDVRKMIAKSEQEIGKATAKYFFYSNIMNFFKTEITLANGEIRKRPLIETNGETGEIVWDKGRDFATVRKVLSMPQVNIVKKTEVQTGGFSKESILPKRNSDKLIARKKDWDPKKYGGFDSPTVAYSVLVVAKVEKGKSKKLKSVKELLGITIMERSSFEKNPIDFLEAKGYKEVKKDLIIKLPKYSLFELENGRKRMLASAGELQKGNELALPSKYVNFLYLASHYEKLKGSPEDNEQKQLFVEQHKHYLDEIIEQISEFSKRVILADANLDKVLSAYNKHRDKPIREQAENIIHLFTLTNLGAPAAFKYFDTTIDRKRYTSTKEVLDATLIHQSITGLYETRIDLSQLGGDSRADPKKKRKVAGDMRAANLWPSPLMIKRSKKNSLALSLTADQMVSALLDAEPPILYSEYDPTRPFSEASMMGLLTNLADRELVHMINWAKRVPGFVDLTLHDQVHLLECAWLEILMIGLVWRSMEHPVKLLFAPNLLLDRNQGKCVEGMVEIFDMLLATSSRFRMMNLQGEEFVCLKSIILLNSGVYTFLSSTLKSLEEKDHIHRVLDKITDTLIHLMAKAGLTLQQQHQRLAQLLLILSHIRHMSNKGMEHLYSMKCKNVVPLYDLLLEAADAHRLHAPTSRGGASVEETDQSHLATAGSTSSHSLQKYYITGEAEGFPATA

SEQ ID NO: 261 - protein, 2037 aa, Artificial Sequence
  #Cas9 variant 12
APKKKRKVGIHGVPAATGGGSAGDMRAANLWPSPLMIKRSKKNSLALSLTADQMVSALLDAEPPILYSEYDPTRPFSEASMMGLLTNLADRELVHMINWAKRVPGFVDLTLHDQVHLLECAWLEILMIGLVWRSMEHPVKLLFAPNLLLDRNQGKCVEGMVEIFDMLLATSSRFRMMNLQGEEFVCLKSIILLNSGVYTFLSSTLKSLEEKDHIHRVLDKITDTLIHLMAKAGLTLQQQHQRLAQLLLILSHIRHMSNKGMEHLYSMKCKNVVPLYDLLLEAADAHRLHAPTSRGGASVEETDQSHLATAGSTSSHSLQKYYITGEAEGFPATASGSETPGTSEGADKKYSIGLDIGTNSVGWAVITDEYKVPSKKFKVLGNTDRHSIKKNLIGALLFDSGETAEATRLKRTARRRYTRRKNRICYLQEIFSNEMAKVDDSFFHRLEESFLVEEDKKHERHPIFGNIVDEVAYHEKYPTIYHLRKKLVDSTDKADLRLIYLALAHMIKFRGHFLIEGDLNPDNSDVDKLFIQLVQTYNQLFEENPINASGVDAKAILSARLSKSRRLENLIAQLPGEKKNGLFGNLIALSLGLTPNFKSNFDLAEDAKLQLSKDTYDDDLDNLLAQIGDQYADLFLAAKNLSDAILLSDILRVNTEITKAPLSASMIKRYDEHHQDLTLLKALVRQQLPEKYKEIFFDQSKNGYAGYIDGGASQEEFYKFIKPILEKMDGTEELLVKLNREDLLRKQRTFDNGSIPHQIHLGELHAILRRQEDFYPFLKDNREKIEKILTFRIPYYVGPLARGNSRFAWMTRKSEETITPWNFEEVVDKGASAQSFIERMTNFDKNLPNEKVLPKHSLLYEYFTVYNELTKVKYVTEGMRKPAFLSGEQKKAIVDLLFKTNRKVTVKQLKEDYFKKIECFDSVEISGVEDRFNASLGTYHDLLKIIKDKDFLDNEENEDILEDIVLTLTLFEDREMIEERLKTYAHLFDDKVMKQLKRRRYTGWGRLSRKLINGIRDKQSGKTILDFLKSDGFANRNFMQLIHDDSLTFKEDIQKAQVSGQGDSLHEHIANLAGSPAIKKGILQTVKVVDELVKVMGRHKPENIVIEMARENQTTQKGQKNSRERMKRIEEGIKELGSQILKEHPVENTQLQNEKLYLYYLQNGRDMYVDQELDINRLSDYDVDHIVPQSFLKDDSIDNKVLTRSDKNRGKSDNVPSEEVVKKMKNYWRQLLNAKLITQRKFDNLTKAERGGLSELDKAGFIKRQLVETRQITKHVAQILDSRMNTKYDENDKLIREVKVITLKSKLVSDFRKDFQFYKVREINNYHHAHDAYLNAVVGTALIKKYPKLESEFVYGDYKVYDVRKMIAKSEQEIGKATAKYFFYSNIMNFFKTEITLANGEIRKRPLIETNGETGEIVWDKGRDFATVRKVLSMPQVNIVKKTEVQTGGFSKESILPKRNSDKLIARKKDWDPKKYGGFDSPTVAYSVLVVAKVEKGKSKKLKSVKELLGITIMERSSFEKNPIDFLEAKGYKEVKKDLIIKLPKYSLFELENGRKRMLASAGELQKGNELALPSKYVNFLYLASHYEKLKGSPEDNEQKQLFVEQHKHYLDEIIEQISEFSKRVILADANLDKVLSAYNKHRDKPIREQAENIIHLFTLTNLGAPAAFKYFDTTIDRKRYTSTKEVLDATLIHQSITGLYETRIDLSQLGGDSRADPKKKRKVAGDMRAANLWPSPLMIKRSKKNSLALSLTADQMVSALLDAEPPILYSEYDPTRPFSEASMMGLLTNLADRELVHMINWAKRVPGFVDLTLHDQVHLLECAWLEILMIGLVWRSMEHPVKLLFAPNLLLDRNQGKCVEGMVEIFDMLLATSSRFRMMNLQGEEFVCLKSIILLNSGVYTFLSSTLKSLEEKDHIHRVLDKITDTLIHLMAKAGLTLQQQHQRLAQLLLILSHIRHMSNKGMEHLYSMKCKNVVPLYDLLLEAADAHRLHAPTSRGGASVEETDQSHLATAGSTSSHSLQKYYITGEAEGFPATA

SEQ ID NO: 262 - protein, 2031 aa, Artificial Sequence
  #Cas9 variant 13
APKKKRKVGIHGVPAATGGGSAGDMRAANLWPSPLMIKRSKKNSLALSLTADQMVSALLDAEPPILYSEYDPTRPFSEASMMGLLTNLADRELVHMINWAKRVPGFVDLTLHDQVHLLECAWLEILMIGLVWRSMEHPVKLLFAPNLLLDRNQGKCVEGMVEIFDMLLATSSRFRMMNLQGEEFVCLKSIILLNSGVYTFLSSTLKSLEEKDHIHRVLDKITDTLIHLMAKAGLTLQQQHQRLAQLLLILSHIRHMSNKGMEHLYSMKCKNVVPLYDLLLEAADAHRLHAPTSRGGASVEETDQSHLATAGSTSSHSLQKYYITGEAEGFPATATPESGADKKYSIGLDIGTNSVGWAVITDEYKVPSKKFKVLGNTDRHSIKKNLIGALLFDSGETAEATRLKRTARRRYTRRKNRICYLQEIFSNEMAKVDDSFFHRLEESFLVEEDKKHERHPIFGNIVDEVAYHEKYPTIYHLRKKLVDSTDKADLRLIYLALAHMIKFRGHFLIEGDLNPDNSDVDKLFIQLVQTYNQLFEENPINASGVDAKAILSARLSKSRRLENLIAQLPGEKKNGLFGNLIALSLGLTPNFKSNFDLAEDAKLQLSKDTYDDDLDNLLAQIGDQYADLFLAAKNLSDAILLSDILRVNTEITKAPLSASMIKRYDEHHQDLTLLKALVRQQLPEKYKEIFFDQSKNGYAGYIDGGASQEEFYKFIKPILEKMDGTEELLVKLNREDLLRKQRTFDNGSIPHQIHLGELHAILRRQEDFYPFLKDNREKIEKILTFRIPYYVGPLARGNSRFAWMTRKSEETITPWNFEEVVDKGASAQSFIERMTNFDKNLPNEKVLPKHSLLYEYFTVYNELTKVKYVTEGMRKPAFLSGEQKKAIVDLLFKTNRKVTVKQLKEDYFKKIECFDSVEISGVEDRFNASLGTYHDLLKIIKDKDFLDNEENEDILEDIVLTLTLFEDREMIEERLKTYAHLFDDKVMKQLKRRRYTGWGRLSRKLINGIRDKQSGKTILDFLKSDGFANRNFMQLIHDDSLTFKEDIQKAQVSGQGDSLHEHIANLAGSPAIKKGILQTVKVVDELVKVMGRHKPENIVIEMARENQTTQKGQKNSRERMKRIEEGIKELGSQILKEHPVENTQLQNEKLYLYYLQNGRDMYVDQELDINRLSDYDVDHIVPQSFLKDDSIDNKVLTRSDKNRGKSDNVPSEEVVKKMKNYWRQLLNAKLITQRKFDNLTKAERGGLSELDKAGFIKRQLVETRQITKHVAQILDSRMNTKYDENDKLIREVKVITLKSKLVSDFRKDFQFYKVREINNYHHAHDAYLNAVVGTALIKKYPKLESEFVYGDYKVYDVRKMIAKSEQEIGKATAKYFFYSNIMNFFKTEITLANGEIRKRPLIETNGETGEIVWDKGRDFATVRKVLSMPQVNIVKKTEVQTGGFSKESILPKRNSDKLIARKKDWDPKKYGGFDSPTVAYSVLVVAKVEKGKSKKLKSVKELLGITIMERSSFEKNPIDFLEAKGYKEVKKDLIIKLPKYSLFELENGRKRMLASAGELQKGNELALPSKYVNFLYLASHYEKLKGSPEDNEQKQLFVEQHKHYLDEIIEQISEFSKRVILADANLDKVLSAYNKHRDKPIREQAENIIHLFTLTNLGAPAAFKYFDTTIDRKRYTSTKEVLDATLIHQSITGLYETRIDLSQLGGDSRADPKKKRKVAGDMRAANLWPSPLMIKRSKKNSLALSLTADQMVSALLDAEPPILYSEYDPTRPFSEASMMGLLTNLADRELVHMINWAKRVPGFVDLTLHDQVHLLECAWLEILMIGLVWRSMEHPVKLLFAPNLLLDRNQGKCVEGMVEIFDMLLATSSRFRMMNLQGEEFVCLKSIILLNSGVYTFLSSTLKSLEEKDHIHRVLDKITDTLIHLMAKAGLTLQQQHQRLAQLLLILSHIRHMSNKGMEHLYSMKCKNVVPLYDLLLEAADAHRLHAPTSRGGASVEETDQSHLATAGSTSSHSLQKYYITGEAEGFPATA

SEQ ID NO: 263 - protein, 2038 aa, Artificial Sequence
  #Cas9 variant 14
APKKKRKVGIHGVPAATGPGGSAGDTTGPGGSAGDMRAANLWPSPLMIKRSKKNSLALSLTADQMVSALLDAEPPILYSEYDPTRPFSEASMMGLLTNLADRELVHMINWAKRVPGFVDLTLHDQVHLLECAWLEILMIGLVWRSMEHPVKLLFAPNLLLDRNQGKCVEGMVEIFDMLLATSSRFRMMNLQGEEFVCLKSIILLNSGVYTFLSSTLKSLEEKDHIHRVLDKITDTLIHLMAKAGLTLQQQHQRLAQLLLILSHIRHMSNKGMEHLYSMKCKNVVPLYDLLLEAADAHRLHAPTSRGGASVEETDQSHLATAGSTSSHSLQKYYITGEAEGFPATAGADKKYSIGLDIGTNSVGWAVITDEYKVPSKKFKVLGNTDRHSIKKNLIGALLFDSGETAEATRLKRTARRRYTRRKNRICYLQEIFSNEMAKVDDSFFHRLEESFLVEEDKKHERHPIFGNIVDEVAYHEKYPTIYHLRKKLVDSTDKADLRLIYLALAHMIKFRGHFLIEGDLNPDNSDVDKLFIQLVQTYNQLFEENPINASGVDAKAILSARLSKSRRLENLIAQLPGEKKNGLFGNLIALSLGLTPNFKSNFDLAEDAKLQLSKDTYDDDLDNLLAQIGDQYADLFLAAKNLSDAILLSDILRVNTEITKAPLSASMIKRYDEHHQDLTLLKALVRQQLPEKYKEIFFDQSKNGYAGYIDGGASQEEFYKFIKPILEKMDGTEELLVKLNREDLLRKQRTFDNGSIPHQIHLGELHAILRRQEDFYPFLKDNREKIEKILTFRIPYYVGPLARGNSRFAWMTRKSEETITPWNFEEVVDKGASAQSFIERMTNFDKNLPNEKVLPKHSLLYEYFTVYNELTKVKYVTEGMRKPAFLSGEQKKAIVDLLFKTNRKVTVKQLKEDYFKKIECFDSVEISGVEDRFNASLGTYHDLLKIIKDKDFLDNEENEDILEDIVLTLTLFEDREMIEERLKTYAHLFDDKVMKQLKRRRYTGWGRLSRKLINGIRDKQSGKTILDFLKSDGFANRNFMQLIHDDSLTFKEDIQKAQVSGQGDSLHEHIANLAGSPAIKKGILQTVKVVDELVKVMGRHKPENIVIEMARENQTTQKGQKNSRERMKRIEEGIKELGSQILKEHPVENTQLQNEKLYLYYLQNGRDMYVDQELDINRLSDYDVDHIVPQSFLKDDSIDNKVLTRSDKNRGKSDNVPSEEVVKKMKNYWRQLLNAKLITQRKFDNLTKAERGGLSELDKAGFIKRQLVETRQITKHVAQILDSRMNTKYDENDKLIREVKVITLKSKLVSDFRKDFQFYKVREINNYHHAHDAYLNAVVGTALIKKYPKLESEFVYGDYKVYDVRKMIAKSEQEIGKATAKYFFYSNIMNFFKTEITLANGEIRKRPLIETNGETGEIVWDKGRDFATVRKVLSMPQVNIVKKTEVQTGGFSKESILPKRNSDKLIARKKDWDPKKYGGFDSPTVAYSVLVVAKVEKGKSKKLKSVKELLGITIMERSSFEKNPIDFLEAKGYKEVKKDLIIKLPKYSLFELENGRKRMLASAGELQKGNELALPSKYVNFLYLASHYEKLKGSPEDNEQKQLFVEQHKHYLDEIIEQISEFSKRVILADANLDKVLSAYNKHRDKPIREQAENIIHLFTLTNLGAPAAFKYFDTTIDRKRYTSTKEVLDATLIHQSITGLYETRIDLSQLGGDSRADPKKKRKVAGDMRAANLWPSPLMIKRSKKNSLALSLTADQMVSALLDAEPPILYSEYDPTRPFSEASMMGLLTNLADRELVHMINWAKRVPGFVDLTLHDQVHLLECAWLEILMIGLVWRSMEHPVKLLFAPNLLLDRNQGKCVEGMVEIFDMLLATSSRFRMMNLQGEEFVCLKSIILLNSGVYTFLSSTLKSLEEKDHIHRVLDKITDTLIHLMAKAGLTLQQQHQRLAQLLLILSHIRHMSNKGMEHLYSMKCKNVVPLYDLLLEAADAHRLHAPTSRGGASVEETDQSHLATAGSTSSHSLQKYYITGEAEGFPATA

SEQ ID NO: 264 - protein, 2035 aa, Artificial Sequence
  #Cas9 variant 15
APKKKRKVGIHGVPAATGGGSAGDMRAANLWPSPLMIKRSKKNSLALSLTADQMVSALLDAEPPILYSEYDPTRPFSEASMMGLLTNLADRELVHMINWAKRVPGFVDLTLHDQVHLLECAWLEILMIGLVWRSMEHPVKLLFAPNLLLDRNQGKCVEGMVEIFDMLLATSSRFRMMNLQGEEFVCLKSIILLNSGVYTFLSSTLKSLEEKDHIHRVLDKITDTLIHLMAKAGLTLQQQHQRLAQLLLILSHIRHMSNKGMEHLYSMKCKNVVPLYDLLLEAADAHRLHAPTSRGGASVEETDQSHLATAGSTSSHSLQKYYITGEAEGFPATASESATPESGADKKYSIGLDIGTNSVGWAVITDEYKVPSKKFKVLGNTDRHSIKKNLIGALLFDSGETAEATRLKRTARRRYTRRKNRICYLQEIFSNEMAKVDDSFFHRLEESFLVEEDKKHERHPIFGNIVDEVAYHEKYPTIYHLRKKLVDSTDKADLRLIYLALAHMIKFRGHFLIEGDLNPDNSDVDKLFIQLVQTYNQLFEENPINASGVDAKAILSARLSKSRRLENLIAQLPGEKKNGLFGNLIALSLGLTPNFKSNFDLAEDAKLQLSKDTYDDDLDNLLAQIGDQYADLFLAAKNLSDAILLSDILRVNTEITKAPLSASMIKRYDEHHQDLTLLKALVRQQLPEKYKEIFFDQSKNGYAGYIDGGASQEEFYKFIKPILEKMDGTEELLVKLNREDLLRKQRTFDNGSIPHQIHLGELHAILRRQEDFYPFLKDNREKIEKILTFRIPYYVGPLARGNSRFAWMTRKSEETITPWNFEEVVDKGASAQSFIERMTNFDKNLPNEKVLPKHSLLYEYFTVYNELTKVKYVTEGMRKPAFLSGEQKKAIVDLLFKTNRKVTVKQLKEDYFKKIECFDSVEISGVEDRFNASLGTYHDLLKIIKDKDFLDNEENEDILEDIVLTLTLFEDREMIEERLKTYAHLFDDKVMKQLKRRRYTGWGRLSRKLINGIRDKQSGKTILDFLKSDGFANRNFMQLIHDDSLTFKEDIQKAQVSGQGDSLHEHIANLAGSPAIKKGILQTVKVVDELVKVMGRHKPENIVIEMARENQTTQKGQKNSRERMKRIEEGIKELGSQILKEHPVENTQLQNEKLYLYYLQNGRDMYVDQELDINRLSDYDVDHIVPQSFLKDDSIDNKVLTRSDKNRGKSDNVPSEEVVKKMKNYWRQLLNAKLITQRKFDNLTKAERGGLSELDKAGFIKRQLVETRQITKHVAQILDSRMNTKYDENDKLIREVKVITLKSKLVSDFRKDFQFYKVREINNYHHAHDAYLNAVVGTALIKKYPKLESEFVYGDYKVYDVRKMIAKSEQEIGKATAKYFFYSNIMNFFKTEITLANGEIRKRPLIETNGETGEIVWDKGRDFATVRKVLSMPQVNIVKKTEVQTGGFSKESILPKRNSDKLIARKKDWDPKKYGGFDSPTVAYSVLVVAKVEKGKSKKLKSVKELLGITIMERSSFEKNPIDFLEAKGYKEVKKDLIIKLPKYSLFELENGRKRMLASAGELQKGNELALPSKYVNFLYLASHYEKLKGSPEDNEQKQLFVEQHKHYLDEIIEQISEFSKRVILADANLDKVLSAYNKHRDKPIREQAENIIHLFTLTNLGAPAAFKYFDTTIDRKRYTSTKEVLDATLIHQSITGLYETRIDLSQLGGDSRADPKKKRKVAGDMRAANLWPSPLMIKRSKKNSLALSLTADQMVSALLDAEPPILYSEYDPTRPFSEASMMGLLTNLADRELVHMINWAKRVPGFVDLTLHDQVHLLECAWLEILMIGLVWRSMEHPVKLLFAPNLLLDRNQGKCVEGMVEIFDMLLATSSRFRMMNLQGEEFVCLKSIILLNSGVYTFLSSTLKSLEEKDHIHRVLDKITDTLIHLMAKAGLTLQQQHQRLAQLLLILSHIRHMSNKGMEHLYSMKCKNVVPLYDLLLEAADAHRLHAPTSRGGASVEETDQSHLATAGSTSSHSLQKYYITGEAEGFPATA

SEQ ID NO: 265 - protein, 2031 aa, Artificial Sequence
  #Cas9 variant 16
APKKKRKVGIHGVPAATGGGSAGDMRAANLWPSPLMIKRSKKNSLALSLTADQMVSALLDAEPPILYSEYDPTRPFSEASMMGLLTNLADRELVHMINWAKRVPGFVDLTLHDQVHLLECAWLEILMIGLVWRSMEHPVKLLFAPNLLLDRNQGKCVEGMVEIFDMLLATSSRFRMMNLQGEEFVCLKSIILLNSGVYTFLSSTLKSLEEKDHIHRVLDKITDTLIHLMAKAGLTLQQQHQRLAQLLLILSHIRHMSNKGMEHLYSMKCKNVVPLYDLLLEAADAHRLHAPTSRGGASVEETDQSHLATAGSTSSHSLQKYYITGEAEGFPATASGSEGADKKYSIGLDIGTNSVGWAVITDEYKVPSKKFKVLGNTDRHSIKKNLIGALLFDSGETAEATRLKRTARRRYTRRKNRICYLQEIFSNEMAKVDDSFFHRLEESFLVEEDKKHERHPIFGNIVDEVAYHEKYPTIYHLRKKLVDSTDKADLRLIYLALAHMIKFRGHFLIEGDLNPDNSDVDKLFIQLVQTYNQLFEENPINASGVDAKAILSARLSKSRRLENLIAQLPGEKKNGLFGNLIALSLGLTPNFKSNFDLAEDAKLQLSKDTYDDDLDNLLAQIGDQYADLFLAAKNLSDAILLSDILRVNTEITKAPLSASMIKRYDEHHQDLTLLKALVRQQLPEKYKEIFFDQSKNGYAGYIDGGASQEEFYKFIKPILEKMDGTEELLVKLNREDLLRKQRTFDNGSIPHQIHLGELHAILRRQEDFYPFLKDNREKIEKILTFRIPYYVGPLARGNSRFAWMTRKSEETITPWNFEEVVDKGASAQSFIERMTNFDKNLPNEKVLPKHSLLYEYFTVYNELTKVKYVTEGMRKPAFLSGEQKKAIVDLLFKTNRKVTVKQLKEDYFKKIECFDSVEISGVEDRFNASLGTYHDLLKIIKDKDFLDNEENEDILEDIVLTLTLFEDREMIEERLKTYAHLFDDKVMKQLKRRRYTGWGRLSRKLINGIRDKQSGKTILDFLKSDGFANRNFMQLIHDDSLTFKEDIQKAQVSGQGDSLHEHIANLAGSPAIKKGILQTVKVVDELVKVMGRHKPENIVIEMARENQTTQKGQKNSRERMKRIEEGIKELGSQILKEHPVENTQLQNEKLYLYYLQNGRDMYVDQELDINRLSDYDVDHIVPQSFLKDDSIDNKVLTRSDKNRGKSDNVPSEEVVKKMKNYWRQLLNAKLITQRKFDNLTKAERGGLSELDKAGFIKRQLVETRQITKHVAQILDSRMNTKYDENDKLIREVKVITLKSKLVSDFRKDFQFYKVREINNYHHAHDAYLNAVVGTALIKKYPKLESEFVYGDYKVYDVRKMIAKSEQEIGKATAKYFFYSNIMNFFKTEITLANGEIRKRPLIETNGETGEIVWDKGRDFATVRKVLSMPQVNIVKKTEVQTGGFSKESILPKRNSDKLIARKKDWDPKKYGGFDSPTVAYSVLVVAKVEKGKSKKLKSVKELLGITIMERSSFEKNPIDFLEAKGYKEVKKDLIIKLPKYSLFELENGRKRMLASAGELQKGNELALPSKYVNFLYLASHYEKLKGSPEDNEQKQLFVEQHKHYLDEIIEQISEFSKRVILADANLDKVLSAYNKHRDKPIREQAENIIHLFTLTNLGAPAAFKYFDTTIDRKRYTSTKEVLDATLIHQSITGLYETRIDLSQLGGDSRADPKKKRKVAGDMRAANLWPSPLMIKRSKKNSLALSLTADQMVSALLDAEPPILYSEYDPTRPFSEASMMGLLTNLADRELVHMINWAKRVPGFVDLTLHDQVHLLECAWLEILMIGLVWRSMEHPVKLLFAPNLLLDRNQGKCVEGMVEIFDMLLATSSRFRMMNLQGEEFVCLKSIILLNSGVYTFLSSTLKSLEEKDHIHRVLDKITDTLIHLMAKAGLTLQQQHQRLAQLLLILSHIRHMSNKGMEHLYSMKCKNVVPLYDLLLEAADAHRLHAPTSRGGASVEETDQSHLATAGSTSSHSLQKYYITGEAEGFPATA

SEQ ID NO: 266 - protein, 2024 aa, Artificial Sequence
  #Cas9 variant 17
APKKKRKVGIHGVPAATGAGDMRAANLWPSPLMIKRSKKNSLALSLTADQMVSALLDAEPPILYSEYDPTRPFSEASMMGLLTNLADRELVHMINWAKRVPGFVDLTLHDQVHLLECAWLEILMIGLVWRSMEHPVKLLFAPNLLLDRNQGKCVEGMVEIFDMLLATSSRFRMMNLQGEEFVCLKSIILLNSGVYTFLSSTLKSLEEKDHIHRVLDKITDTLIHLMAKAGLTLQQQHQRLAQLLLILSHIRHMSNKGMEHLYSMKCKNVVPLYDLLLEAADAHRLHAPTSRGGASVEETDQSHLATAGSTSSHSLQKYYITGEAEGFPATAPGDKKYSIGLDIGTNSVGWAVITDEYKVPSKKFKVLGNTDRHSIKKNLIGALLFDSGETAEATRLKRTARRRYTRRKNRICYLQEIFSNEMAKVDDSFFHRLEESFLVEEDKKHERHPIFGNIVDEVAYHEKYPTIYHLRKKLVDSTDKADLRLIYLALAHMIKFRGHFLIEGDLNPDNSDVDKLFIQLVQTYNQLFEENPINASGVDAKAILSARLSKSRRLENLIAQLPGEKKNGLFGNLIALSLGLTPNFKSNFDLAEDAKLQLSKDTYDDDLDNLLAQIGDQYADLFLAAKNLSDAILLSDILRVNTEITKAPLSASMIKRYDEHHQDLTLLKALVRQQLPEKYKEIFFDQSKNGYAGYIDGGASQEEFYKFIKPILEKMDGTEELLVKLNREDLLRKQRTFDNGSIPHQIHLGELHAILRRQEDFYPFLKDNREKIEKILTFRIPYYVGPLARGNSRFAWMTRKSEETITPWNFEEVVDKGASAQSFIERMTNFDKNLPNEKVLPKHSLLYEYFTVYNELTKVKYVTEGMRKPAFLSGEQKKAIVDLLFKTNRKVTVKQLKEDYFKKIECFDSVEISGVEDRFNASLGTYHDLLKIIKDKDFLDNEENEDILEDIVLTLTLFEDREMIEERLKTYAHLFDDKVMKQLKRRRYTGWGRLSRKLINGIRDKQSGKTILDFLKSDGFANRNFMQLIHDDSLTFKEDIQKAQVSGQGDSLHEHIANLAGSPAIKKGILQTVKVVDELVKVMGRHKPENIVIEMARENQTTQKGQKNSRERMKRIEEGIKELGSQILKEHPVENTQLQNEKLYLYYLQNGRDMYVDQELDINRLSDYDVDHIVPQSFLKDDSIDNKVLTRSDKNRGKSDNVPSEEVVKKMKNYWRQLLNAKLITQRKFDNLTKAERGGLSELDKAGFIKRQLVETRQITKHVAQILDSRMNTKYDENDKLIREVKVITLKSKLVSDFRKDFQFYKVREINNYHHAHDAYLNAVVGTALIKKYPKLESEFVYGDYKVYDVRKMIAKSEQEIGKATAKYFFYSNIMNFFKTEITLANGEIRKRPLIETNGETGEIVWDKGRDFATVRKVLSMPQVNIVKKTEVQTGGFSKESILPKRNSDKLIARKKDWDPKKYGGFDSPTVAYSVLVVAKVEKGKSKKLKSVKELLGITIMERSSFEKNPIDFLEAKGYKEVKKDLIIKLPKYSLFELENGRKRMLASAGELQKGNELALPSKYVNFLYLASHYEKLKGSPEDNEQKQLFVEQHKHYLDEIIEQISEFSKRVILADANLDKVLSAYNKHRDKPIREQAENIIHLFTLTNLGAPAAFKYFDTTIDRKRYTSTKEVLDATLIHQSITGLYETRIDLSQLGGDSRADPKKKRKVAGDMRAANLWPSPLMIKRSKKNSLALSLTADQMVSALLDAEPPILYSEYDPTRPFSEASMMGLLTNLADRELVHMINWAKRVPGFVDLTLHDQVHLLECAWLEILMIGLVWRSMEHPVKLLFAPNLLLDRNQGKCVEGMVEIFDMLLATSSRFRMMNLQGEEFVCLKSIILLNSGVYTFLSSTLKSLEEKDHIHRVLDKITDTLIHLMAKAGLTLQQQHQRLAQLLLILSHIRHMSNKGMEHLYSMKCKNVVPLYDLLLEAADAHRLHAPTSRGGASVEETDQSHLATAGSTSSHSLQKYYITGEAEGFPATA

SEQ ID NO: 267 - protein, 2027 aa, Artificial Sequence
  #Cas9 variant 18
APKKKRKVGIHGVPAATGAGDMRAANLWPSPLMIKRSKKNSLALSLTADQMVSALLDAEPPILYSEYDPTRPFSEASMMGLLTNLADRELVHMINWAKRVPGFVDLTLHDQVHLLECAWLEILMIGLVWRSMEHPVKLLFAPNLLLDRNQGKCVEGMVEIFDMLLATSSRFRMMNLQGEEFVCLKSIILLNSGVYTFLSSTLKSLEEKDHIHRVLDKITDTLIHLMAKAGLTLQQQHQRLAQLLLILSHIRHMSNKGMEHLYSMKCKNVVPLYDLLLEAADAHRLHAPTSRGGASVEETDQSHLATAGSTSSHSLQKYYITGEAEGFPATAGADKKYSIGLDIGTNSVGWAVITDEYKVPSKKFKVLGNTDRHSIKKNLIGALLFDSGETAEATRLKRTARRRYTRRKNRICYLQEIFSNEMAKVDDSFFHRLEESFLVEEDKKHERHPIFGNIVDEVAYHEKYPTIYHLRKKLVDSTDKADLRLIYLALAHMIKFRGHFLIEGDLNPDNSDVDKLFIQLVQTYNQLFEENPINASGVDAKAILSARLSKSRRLENLIAQLPGEKKNGLFGNLIALSLGLTPNFKSNFDLAEDAKLQLSKDTYDDDLDNLLAQIGDQYADLFLAAKNLSDAILLSDILRVNTEITKAPLSASMIKRYDEHHQDLTLLKALVRQQLPEKYKEIFFDQSKNGYAGYIDGGASQEEFYKFIKPILEKMDGTEELLVKLNREDLLRKQRTFDNGSIPHQIHLGELHAILRRQEDFYPFLKDNREKIEKILTFRIPYYVGPLARGNSRFAWMTRKSEETITPWNFEEVVDKGASAQSFIERMTNFDKNLPNEKVLPKHSLLYEYFTVYNELTKVKYVTEGMRKPAFLSGEQKKAIVDLLFKTNRKVTVKQLKEDYFKKIECFDSVEISGVEDRFNASLGTYHDLLKIIKDKDFLDNEENEDILEDIVLTLTLFEDREMIEERLKTYAHLFDDKVMKQLKRRRYTGWGRLSRKLINGIRDKQSGKTILDFLKSDGFANRNFMQLIHDDSLTFKEDIQKAQVSGQGDSLHEHIANLAGSPAIKKGILQTVKVVDELVKVMGRHKPENIVIEMARENQTTQKGQKNSRERMKRIEEGIKELGSQILKEHPVENTQLQNEKLYLYYLQNGRDMYVDQELDINRLSDYDVDHIVPQSFLKDDSIDNKVLTRSDKNRGKSDNVPSEEVVKKMKNYWRQLLNAKLITQRKFDNLTKAERGGLSELDKAGFIKRQLVETRQITKHVAQILDSRMNTKYDENDKLIREVKVITLKSKLVSDFRKDFQFYKVREINNYHHAHDAYLNAVVGTALIKKYPKLESEFVYGDYKVYDVRKMIAKSEQEIGKATAKYFFYSNIMNFFKTEITLANGEIRKRPLIETNGETGEIVWDKGRDFATVRKVLSMPQVNIVKKTEVQTGGFSKESILPKRNSDKLIARKKDWDPKKYGGFDSPTVAYSVLVVAKVEKGKSKKLKSVKELLGITIMERSSFEKNPIDFLEAKGYKEVKKDLIIKLPKYSLFELENGRKRMLASAGELQKGNELALPSKYVNFLYLASHYEKLKGSPEDNEQKQLFVEQHKHYLDEIIEQISEFSKRVILADANLDKVLSAYNKHRDKPIREQAENIIHLFTLTNLGAPAAFKYFDTTIDRKRYTSTKEVLDATLIHQSITGLYETRIDLSQLGGDSRADPKKKRKVSGSAGDMRAANLWPSPLMIKRSKKNSLALSLTADQMVSALLDAEPPILYSEYDPTRPFSEASMMGLLTNLADRELVHMINWAKRVPGFVDLTLHDQVHLLECAWLEILMIGLVWRSMEHPVKLLFAPNLLLDRNQGKCVEGMVEIFDMLLATSSRFRMMNLQGEEFVCLKSIILLNSGVYTFLSSTLKSLEEKDHIHRVLDKITDTLIHLMAKAGLTLQQQHQRLAQLLLILSHIRHMSNKGMEHLYSMKCKNVVPLYDLLLEAADAHRLHAPTSRGGASVEETDQSHLATAGSTSSHSLQKYYITGEAEGFPATA

SEQ ID NO: 268 - protein, 2028 aa, Artificial Sequence
  #Cas9 variant 19
APKKKRKVGIHGVPAATGAGDMRAANLWPSPLMIKRSKKNSLALSLTADQMVSALLDAEPPILYSEYDPTRPFSEASMMGLLTNLADRELVHMINWAKRVPGFVDLTLHDQVHLLECAWLEILMIGLVWRSMEHPVKLLFAPNLLLDRNQGKCVEGMVEIFDMLLATSSRFRMMNLQGEEFVCLKSIILLNSGVYTFLSSTLKSLEEKDHIHRVLDKITDTLIHLMAKAGLTLQQQHQRLAQLLLILSHIRHMSNKGMEHLYSMKCKNVVPLYDLLLEAADAHRLHAPTSRGGASVEETDQSHLATAGSTSSHSLQKYYITGEAEGFPATAGADKKYSIGLDIGTNSVGWAVITDEYKVPSKKFKVLGNTDRHSIKKNLIGALLFDSGETAEATRLKRTARRRYTRRKNRICYLQEIFSNEMAKVDDSFFHRLEESFLVEEDKKHERHPIFGNIVDEVAYHEKYPTIYHLRKKLVDSTDKADLRLIYLALAHMIKFRGHFLIEGDLNPDNSDVDKLFIQLVQTYNQLFEENPINASGVDAKAILSARLSKSRRLENLIAQLPGEKKNGLFGNLIALSLGLTPNFKSNFDLAEDAKLQLSKDTYDDDLDNLLAQIGDQYADLFLAAKNLSDAILLSDILRVNTEITKAPLSASMIKRYDEHHQDLTLLKALVRQQLPEKYKEIFFDQSKNGYAGYIDGGASQEEFYKFIKPILEKMDGTEELLVKLNREDLLRKQRTFDNGSIPHQIHLGELHAILRRQEDFYPFLKDNREKIEKILTFRIPYYVGPLARGNSRFAWMTRKSEETITPWNFEEVVDKGASAQSFIERMTNFDKNLPNEKVLPKHSLLYEYFTVYNELTKVKYVTEGMRKPAFLSGEQKKAIVDLLFKTNRKVTVKQLKEDYFKKIECFDSVEISGVEDRFNASLGTYHDLLKIIKDKDFLDNEENEDILEDIVLTLTLFEDREMIEERLKTYAHLFDDKVMKQLKRRRYTGWGRLSRKLINGIRDKQSGKTILDFLKSDGFANRNFMQLIHDDSLTFKEDIQKAQVSGQGDSLHEHIANLAGSPAIKKGILQTVKVVDELVKVMGRHKPENIVIEMARENQTTQKGQKNSRERMKRIEEGIKELGSQILKEHPVENTQLQNEKLYLYYLQNGRDMYVDQELDINRLSDYDVDHIVPQSFLKDDSIDNKVLTRSDKNRGKSDNVPSEEVVKKMKNYWRQLLNAKLITQRKFDNLTKAERGGLSELDKAGFIKRQLVETRQITKHVAQILDSRMNTKYDENDKLIREVKVITLKSKLVSDFRKDFQFYKVREINNYHHAHDAYLNAVVGTALIKKYPKLESEFVYGDYKVYDVRKMIAKSEQEIGKATAKYFFYSNIMNFFKTEITLANGEIRKRPLIETNGETGEIVWDKGRDFATVRKVLSMPQVNIVKKTEVQTGGFSKESILPKRNSDKLIARKKDWDPKKYGGFDSPTVAYSVLVVAKVEKGKSKKLKSVKELLGITIMERSSFEKNPIDFLEAKGYKEVKKDLIIKLPKYSLFELENGRKRMLASAGELQKGNELALPSKYVNFLYLASHYEKLKGSPEDNEQKQLFVEQHKHYLDEIIEQISEFSKRVILADANLDKVLSAYNKHRDKPIREQAENIIHLFTLTNLGAPAAFKYFDTTIDRKRYTSTKEVLDATLIHQSITGLYETRIDLSQLGGDSRADPKKKRKVGGGSAGDMRAANLWPSPLMIKRSKKNSLALSLTADQMVSALLDAEPPILYSEYDPTRPFSEASMMGLLTNLADRELVHMINWAKRVPGFVDLTLHDQVHLLECAWLEILMIGLVWRSMEHPVKLLFAPNLLLDRNQGKCVEGMVEIFDMLLATSSRFRMMNLQGEEFVCLKSIILLNSGVYTFLSSTLKSLEEKDHIHRVLDKITDTLIHLMAKAGLTLQQQHQRLAQLLLILSHIRHMSNKGMEHLYSMKCKNVVPLYDLLLEAADAHRLHAPTSRGGASVEETDQSHLATAGSTSSHSLQKYYITGEAEGFPATA

SEQ ID NO: 269 - protein, 2349 aa, Artificial Sequence
  #Cas9 variant 20
APKKKRKVGIHGVPAATGAGDMRAANLWPSPLMIKRSKKNSLALSLTADQMVSALLDAEPPILYSEYDPTRPFSEASMMGLLTNLADRELVHMINWAKRVPGFVDLTLHDQVHLLECAWLEILMIGLVWRSMEHPVKLLFAPNLLLDRNQGKCVEGMVEIFDMLLATSSRFRMMNLQGEEFVCLKSIILLNSGVYTFLSSTLKSLEEKDHIHRVLDKITDTLIHLMAKAGLTLQQQHQRLAQLLLILSHIRHMSNKGMEHLYSMKCKNVVPLYDLLLEAADAHRLHAPTSRGGASVEETDQSHLATAGSTSSHSLQKYYITGEAEGFPATAGGSPRGGSAGDMRAANLWPSPLMIKRSKKNSLALSLTADQMVSALLDAEPPILYSEYDPTRPFSEASMMGLLTNLADRELVHMINWAKRVPGFVDLTLHDQVHLLECAWLEILMIGLVWRSMEHPVKLLFAPNLLLDRNQGKCVEGMVEIFDMLLATSSRFRMMNLQGEEFVCLKSIILLNSGVYTFLSSTLKSLEEKDHIHRVLDKITDTLIHLMAKAGLTLQQQHQRLAQLLLILSHIRHMSNKGMEHLYSMKCKNVVPLYDLLLEAADAHRLHAPTSRGGASVEETDQSHLATAGSTSSHSLQKYYITGEAEGFPATATPESGADKKYSIGLDIGTNSVGWAVITDEYKVPSKKFKVLGNTDRHSIKKNLIGALLFDSGETAEATRLKRTARRRYTRRKNRICYLQEIFSNEMAKVDDSFFHRLEESFLVEEDKKHERHPIFGNIVDEVAYHEKYPTIYHLRKKLVDSTDKADLRLIYLALAHMIKFRGHFLIEGDLNPDNSDVDKLFIQLVQTYNQLFEENPINASGVDAKAILSARLSKSRRLENLIAQLPGEKKNGLFGNLIALSLGLTPNFKSNFDLAEDAKLQLSKDTYDDDLDNLLAQIGDQYADLFLAAKNLSDAILLSDILRVNTEITKAPLSASMIKRYDEHHQDLTLLKALVRQQLPEKYKEIFFDQSKNGYAGYIDGGASQEEFYKFIKPILEKMDGTEELLVKLNREDLLRKQRTFDNGSIPHQIHLGELHAILRRQEDFYPFLKDNREKIEKILTFRIPYYVGPLARGNSRFAWMTRKSEETITPWNFEEVVDKGASAQSFIERMTNFDKNLPNEKVLPKHSLLYEYFTVYNELTKVKYVTEGMRKPAFLSGEQKKAIVDLLFKTNRKVTVKQLKEDYFKKIECFDSVEISGVEDRFNASLGTYHDLLKIIKDKDFLDNEENEDILEDIVLTLTLFEDREMIEERLKTYAHLFDDKVMKQLKRRRYTGWGRLSRKLINGIRDKQSGKTILDFLKSDGFANRNFMQLIHDDSLTFKEDIQKAQVSGQGDSLHEHIANLAGSPAIKKGILQTVKVVDELVKVMGRHKPENIVIEMARENQTTQKGQKNSRERMKRIEEGIKELGSQILKEHPVENTQLQNEKLYLYYLQNGRDMYVDQELDINRLSDYDVDHIVPQSFLKDDSIDNKVLTRSDKNRGKSDNVPSEEVVKKMKNYWRQLLNAKLITQRKFDNLTKAERGGLSELDKAGFIKRQLVETRQITKHVAQILDSRMNTKYDENDKLIREVKVITLKSKLVSDFRKDFQFYKVREINNYHHAHDAYLNAVVGTALIKKYPKLESEFVYGDYKVYDVRKMIAKSEQEIGKATAKYFFYSNIMNFFKTEITLANGEIRKRPLIETNGETGEIVWDKGRDFATVRKVLSMPQVNIVKKTEVQTGGFSKESILPKRNSDKLIARKKDWDPKKYGGFDSPTVAYSVLVVAKVEKGKSKKLKSVKELLGITIMERSSFEKNPIDFLEAKGYKEVKKDLIIKLPKYSLFELENGRKRMLASAGELQKGNELALPSKYVNFLYLASHYEKLKGSPEDNEQKQLFVEQHKHYLDEIIEQISEFSKRVILADANLDKVLSAYNKHRDKPIREQAENIIHLFTLTNLGAPAAFKYFDTTIDRKRYTSTKEVLDATLIHQSITGLYETRIDLSQLGGDSRADPKKKRKVAGDMRAANLWPSPLMIKRSKKNSLALSLTADQMVSALLDAEPPILYSEYDPTRPFSEASMMGLLTNLADRELVHMINWAKRVPGFVDLTLHDQVHLLECAWLEILMIGLVWRSMEHPVKLLFAPNLLLDRNQGKCVEGMVEIFDMLLATSSRFRMMNLQGEEFVCLKSIILLNSGVYTFLSSTLKSLEEKDHIHRVLDKITDTLIHLMAKAGLTLQQQHQRLAQLLLILSHIRHMSNKGMEHLYSMKCKNVVPLYDLLLEAADAHRLHAPTSRGGASVEETDQSHLATAGSTSSHSLQKYYITGEAEGFPATA

SEQ ID NO: 270 - protein, 2352 aa, Artificial Sequence
  #Cas9 variant 21
APKKKRKVGIHGVPAATGGGSAGDMRAANLWPSPLMIKRSKKNSLALSLTADQMVSALLDAEPPILYSEYDPTRPFSEASMMGLLTNLADRELVHMINWAKRVPGFVDLTLHDQVHLLECAWLEILMIGLVWRSMEHPVKLLFAPNLLLDRNQGKCVEGMVEIFDMLLATSSRFRMMNLQGEEFVCLKSIILLNSGVYTFLSSTLKSLEEKDHIHRVLDKITDTLIHLMAKAGLTLQQQHQRLAQLLLILSHIRHMSNKGMEHLYSMKCKNVVPLYDLLLEAADAHRLHAPTSRGGASVEETDQSHLATAGSTSSHSLQKYYITGEAEGFPATAGGSPRGGSAGDMRAANLWPSPLMIKRSKKNSLALSLTADQMVSALLDAEPPILYSEYDPTRPFSEASMMGLLTNLADRELVHMINWAKRVPGFVDLTLHDQVHLLECAWLEILMIGLVWRSMEHPVKLLFAPNLLLDRNQGKCVEGMVEIFDMLLATSSRFRMMNLQGEEFVCLKSIILLNSGVYTFLSSTLKSLEEKDHIHRVLDKITDTLIHLMAKAGLTLQQQHQRLAQLLLILSHIRHMSNKGMEHLYSMKCKNVVPLYDLLLEAADAHRLHAPTSRGGASVEETDQSHLATAGSTSSHSLQKYYITGEAEGFPATATPESGADKKYSIGLDIGTNSVGWAVITDEYKVPSKKFKVLGNTDRHSIKKNLIGALLFDSGETAEATRLKRTARRRYTRRKNRICYLQEIFSNEMAKVDDSFFHRLEESFLVEEDKKHERHPIFGNIVDEVAYHEKYPTIYHLRKKLVDSTDKADLRLIYLALAHMIKFRGHFLIEGDLNPDNSDVDKLFIQLVQTYNQLFEENPINASGVDAKAILSARLSKSRRLENLIAQLPGEKKNGLFGNLIALSLGLTPNFKSNFDLAEDAKLQLSKDTYDDDLDNLLAQIGDQYADLFLAAKNLSDAILLSDILRVNTEITKAPLSASMIKRYDEHHQDLTLLKALVRQQLPEKYKEIFFDQSKNGYAGYIDGGASQEEFYKFIKPILEKMDGTEELLVKLNREDLLRKQRTFDNGSIPHQIHLGELHAILRRQEDFYPFLKDNREKIEKILTFRIPYYVGPLARGNSRFAWMTRKSEETITPWNFEEVVDKGASAQSFIERMTNFDKNLPNEKVLPKHSLLYEYFTVYNELTKVKYVTEGMRKPAFLSGEQKKAIVDLLFKTNRKVTVKQLKEDYFKKIECFDSVEISGVEDRFNASLGTYHDLLKIIKDKDFLDNEENEDILEDIVLTLTLFEDREMIEERLKTYAHLFDDKVMKQLKRRRYTGWGRLSRKLINGIRDKQSGKTILDFLKSDGFANRNFMQLIHDDSLTFKEDIQKAQVSGQGDSLHEHIANLAGSPAIKKGILQTVKVVDELVKVMGRHKPENIVIEMARENQTTQKGQKNSRERMKRIEEGIKELGSQILKEHPVENTQLQNEKLYLYYLQNGRDMYVDQELDINRLSDYDVDHIVPQSFLKDDSIDNKVLTRSDKNRGKSDNVPSEEVVKKMKNYWRQLLNAKLITQRKFDNLTKAERGGLSELDKAGFIKRQLVETRQITKHVAQILDSRMNTKYDENDKLIREVKVITLKSKLVSDFRKDFQFYKVREINNYHHAHDAYLNAVVGTALIKKYPKLESEFVYGDYKVYDVRKMIAKSEQEIGKATAKYFFYSNIMNFFKTEITLANGEIRKRPLIETNGETGEIVWDKGRDFATVRKVLSMPQVNIVKKTEVQTGGFSKESILPKRNSDKLIARKKDWDPKKYGGFDSPTVAYSVLVVAKVEKGKSKKLKSVKELLGITIMERSSFEKNPIDFLEAKGYKEVKKDLIIKLPKYSLFELENGRKRMLASAGELQKGNELALPSKYVNFLYLASHYEKLKGSPEDNEQKQLFVEQHKHYLDEIIEQISEFSKRVILADANLDKVLSAYNKHRDKPIREQAENIIHLFTLTNLGAPAAFKYFDTTIDRKRYTSTKEVLDATLIHQSITGLYETRIDLSQLGGDSRADPKKKRKVAGDMRAANLWPSPLMIKRSKKNSLALSLTADQMVSALLDAEPPILYSEYDPTRPFSEASMMGLLTNLADRELVHMINWAKRVPGFVDLTLHDQVHLLECAWLEILMIGLVWRSMEHPVKLLFAPNLLLDRNQGKCVEGMVEIFDMLLATSSRFRMMNLQGEEFVCLKSIILLNSGVYTFLSSTLKSLEEKDHIHRVLDKITDTLIHLMAKAGLTLQQQHQRLAQLLLILSHIRHMSNKGMEHLYSMKCKNVVPLYDLLLEAADAHRLHAPTSRGGASVEETDQSHLATAGSTSSHSLQKYYITGEAEGFPATA

SEQ ID NO: 271 - protein, 2349 aa, Artificial Sequence
  #Cas9 variant 22
APKKKRKVGIHGVPAATGGGSAGDMRAANLWPSPLMIKRSKKNSLALSLTADQMVSALLDAEPPILYSEYDPTRPFSEASMMGLLTNLADRELVHMINWAKRVPGFVDLTLHDQVHLLECAWLEILMIGLVWRSMEHPVKLLFAPNLLLDRNQGKCVEGMVEIFDMLLATSSRFRMMNLQGEEFVCLKSIILLNSGVYTFLSSTLKSLEEKDHIHRVLDKITDTLIHLMAKAGLTLQQQHQRLAQLLLILSHIRHMSNKGMEHLYSMKCKNVVPLYDLLLEAADAHRLHAPTSRGGASVEETDQSHLATAGSTSSHSLQKYYITGEAEGFPATAPRGGSAGDMRAANLWPSPLMIKRSKKNSLALSLTADQMVSALLDAEPPILYSEYDPTRPFSEASMMGLLTNLADRELVHMINWAKRVPGFVDLTLHDQVHLLECAWLEILMIGLVWRSMEHPVKLLFAPNLLLDRNQGKCVEGMVEIFDMLLATSSRFRMMNLQGEEFVCLKSIILLNSGVYTFLSSTLKSLEEKDHIHRVLDKITDTLIHLMAKAGLTLQQQHQRLAQLLLILSHIRHMSNKGMEHLYSMKCKNVVPLYDLLLEAADAHRLHAPTSRGGASVEETDQSHLATAGSTSSHSLQKYYITGEAEGFPATATPESGADKKYSIGLDIGTNSVGWAVITDEYKVPSKKFKVLGNTDRHSIKKNLIGALLFDSGETAEATRLKRTARRRYTRRKNRICYLQEIFSNEMAKVDDSFFHRLEESFLVEEDKKHERHPIFGNIVDEVAYHEKYPTIYHLRKKLVDSTDKADLRLIYLALAHMIKFRGHFLIEGDLNPDNSDVDKLFIQLVQTYNQLFEENPINASGVDAKAILSARLSKSRRLENLIAQLPGEKKNGLFGNLIALSLGLTPNFKSNFDLAEDAKLQLSKDTYDDDLDNLLAQIGDQYADLFLAAKNLSDAILLSDILRVNTEITKAPLSASMIKRYDEHHQDLTLLKALVRQQLPEKYKEIFFDQSKNGYAGYIDGGASQEEFYKFIKPILEKMDGTEELLVKLNREDLLRKQRTFDNGSIPHQIHLGELHAILRRQEDFYPFLKDNREKIEKILTFRIPYYVGPLARGNSRFAWMTRKSEETITPWNFEEVVDKGASAQSFIERMTNFDKNLPNEKVLPKHSLLYEYFTVYNELTKVKYVTEGMRKPAFLSGEQKKAIVDLLFKTNRKVTVKQLKEDYFKKIECFDSVEISGVEDRFNASLGTYHDLLKIIKDKDFLDNEENEDILEDIVLTLTLFEDREMIEERLKTYAHLFDDKVMKQLKRRRYTGWGRLSRKLINGIRDKQSGKTILDFLKSDGFANRNFMQLIHDDSLTFKEDIQKAQVSGQGDSLHEHIANLAGSPAIKKGILQTVKVVDELVKVMGRHKPENIVIEMARENQTTQKGQKNSRERMKRIEEGIKELGSQILKEHPVENTQLQNEKLYLYYLQNGRDMYVDQELDINRLSDYDVDHIVPQSFLKDDSIDNKVLTRSDKNRGKSDNVPSEEVVKKMKNYWRQLLNAKLITQRKFDNLTKAERGGLSELDKAGFIKRQLVETRQITKHVAQILDSRMNTKYDENDKLIREVKVITLKSKLVSDFRKDFQFYKVREINNYHHAHDAYLNAVVGTALIKKYPKLESEFVYGDYKVYDVRKMIAKSEQEIGKATAKYFFYSNIMNFFKTEITLANGEIRKRPLIETNGETGEIVWDKGRDFATVRKVLSMPQVNIVKKTEVQTGGFSKESILPKRNSDKLIARKKDWDPKKYGGFDSPTVAYSVLVVAKVEKGKSKKLKSVKELLGITIMERSSFEKNPIDFLEAKGYKEVKKDLIIKLPKYSLFELENGRKRMLASAGELQKGNELALPSKYVNFLYLASHYEKLKGSPEDNEQKQLFVEQHKHYLDEIIEQISEFSKRVILADANLDKVLSAYNKHRDKPIREQAENIIHLFTLTNLGAPAAFKYFDTTIDRKRYTSTKEVLDATLIHQSITGLYETRIDLSQLGGDSRADPKKKRKVAGDMRAANLWPSPLMIKRSKKNSLALSLTADQMVSALLDAEPPILYSEYDPTRPFSEASMMGLLTNLADRELVHMINWAKRVPGFVDLTLHDQVHLLECAWLEILMIGLVWRSMEHPVKLLFAPNLLLDRNQGKCVEGMVEIFDMLLATSSRFRMMNLQGEEFVCLKSIILLNSGVYTFLSSTLKSLEEKDHIHRVLDKITDTLIHLMAKAGLTLQQQHQRLAQLLLILSHIRHMSNKGMEHLYSMKCKNVVPLYDLLLEAADAHRLHAPTSRGGASVEETDQSHLATAGSTSSHSLQKYYITGEAEGFPATA

SEQ ID NO: 272 - protein, 2340 aa, Artificial Sequence
  #Cas9 variant 23
APKKKRKVGIHGVPAATGAGDMRAANLWPSPLMIKRSKKNSLALSLTADQMVSALLDAEPPILYSEYDPTRPFSEASMMGLLTNLADRELVHMINWAKRVPGFVDLTLHDQVHLLECAWLEILMIGLVWRSMEHPVKLLFAPNLLLDRNQGKCVEGMVEIFDMLLATSSRFRMMNLQGEEFVCLKSIILLNSGVYTFLSSTLKSLEEKDHIHRVLDKITDTLIHLMAKAGLTLQQQHQRLAQLLLILSHIRHMSNKGMEHLYSMKCKNVVPLYDLLLEAADAHRLHAPTSRGGASVEETDQSHLATAGSTSSHSLQKYYITGEAEGFPATAGADKKYSIGLDIGTNSVGWAVITDEYKVPSKKFKVLGNTDRHSIKKNLIGALLFDSGETAEATRLKRTARRRYTRRKNRICYLQEIFSNEMAKVDDSFFHRLEESFLVEEDKKHERHPIFGNIVDEVAYHEKYPTIYHLRKKLVDSTDKADLRLIYLALAHMIKFRGHFLIEGDLNPDNSDVDKLFIQLVQTYNQLFEENPINASGVDAKAILSARLSKSRRLENLIAQLPGEKKNGLFGNLIALSLGLTPNFKSNFDLAEDAKLQLSKDTYDDDLDNLLAQIGDQYADLFLAAKNLSDAILLSDILRVNTEITKAPLSASMIKRYDEHHQDLTLLKALVRQQLPEKYKEIFFDQSKNGYAGYIDGGASQEEFYKFIKPILEKMDGTEELLVKLNREDLLRKQRTFDNGSIPHQIHLGELHAILRRQEDFYPFLKDNREKIEKILTFRIPYYVGPLARGNSRFAWMTRKSEETITPWNFEEVVDKGASAQSFIERMTNFDKNLPNEKVLPKHSLLYEYFTVYNELTKVKYVTEGMRKPAFLSGEQKKAIVDLLFKTNRKVTVKQLKEDYFKKIECFDSVEISGVEDRFNASLGTYHDLLKIIKDKDFLDNEENEDILEDIVLTLTLFEDREMIEERLKTYAHLFDDKVMKQLKRRRYTGWGRLSRKLINGIRDKQSGKTILDFLKSDGFANRNFMQLIHDDSLTFKEDIQKAQVSGQGDSLHEHIANLAGSPAIKKGILQTVKVVDELVKVMGRHKPENIVIEMARENQTTQKGQKNSRERMKRIEEGIKELGSQILKEHPVENTQLQNEKLYLYYLQNGRDMYVDQELDINRLSDYDVDHIVPQSFLKDDSIDNKVLTRSDKNRGKSDNVPSEEVVKKMKNYWRQLLNAKLITQRKFDNLTKAERGGLSELDKAGFIKRQLVETRQITKHVAQILDSRMNTKYDENDKLIREVKVITLKSKLVSDFRKDFQFYKVREINNYHHAHDAYLNAVVGTALIKKYPKLESEFVYGDYKVYDVRKMIAKSEQEIGKATAKYFFYSNIMNFFKTEITLANGEIRKRPLIETNGETGEIVWDKGRDFATVRKVLSMPQVNIVKKTEVQTGGFSKESILPKRNSDKLIARKKDWDPKKYGGFDSPTVAYSVLVVAKVEKGKSKKLKSVKELLGITIMERSSFEKNPIDFLEAKGYKEVKKDLIIKLPKYSLFELENGRKRMLASAGELQKGNELALPSKYVNFLYLASHYEKLKGSPEDNEQKQLFVEQHKHYLDEIIEQISEFSKRVILADANLDKVLSAYNKHRDKPIREQAENIIHLFTLTNLGAPAAFKYFDTTIDRKRYTSTKEVLDATLIHQSITGLYETRIDLSQLGGDSRADPKKKRKVAGDMRAANLWPSPLMIKRSKKNSLALSLTADQMVSALLDAEPPILYSEYDPTRPFSEASMMGLLTNLADRELVHMINWAKRVPGFVDLTLHDQVHLLECAWLEILMIGLVWRSMEHPVKLLFAPNLLLDRNQGKCVEGMVEIFDMLLATSSRFRMMNLQGEEFVCLKSIILLNSGVYTFLSSTLKSLEEKDHIHRVLDKITDTLIHLMAKAGLTLQQQHQRLAQLLLILSHIRHMSNKGMEHLYSMKCKNVVPLYDLLLEAADAHRLHAPTSRGGASVEETDQSHLATAGSTSSHSLQKYYITGEAEGFPATAPAGAGDMRAANLWPSPLMIKRSKKNSLALSLTADQMVSALLDAEPPILYSEYDPTRPFSEASMMGLLTNLADRELVHMINWAKRVPGFVDLTLHDQVHLLECAWLEILMIGLVWRSMEHPVKLLFAPNLLLDRNQGKCVEGMVEIFDMLLATSSRFRMMNLQGEEFVCLKSIILLNSGVYTFLSSTLKSLEEKDHIHRVLDKITDTLIHLMAKAGLTLQQQHQRLAQLLLILSHIRHMSNKGMEHLYSMKCKNVVPLYDLLLEAADAHRLHAPTSRGGASVEETDQSHLATAGSTSSHSLQKYYITGEAEGFPATA

SEQ ID NO: 273 - protein, 2343 aa, Artificial Sequence
  #Cas9 variant 24
APKKKRKVGIHGVPAATGAGDMRAANLWPSPLMIKRSKKNSLALSLTADQMVSALLDAEPPILYSEYDPTRPFSEASMMGLLTNLADRELVHMINWAKRVPGFVDLTLHDQVHLLECAWLEILMIGLVWRSMEHPVKLLFAPNLLLDRNQGKCVEGMVEIFDMLLATSSRFRMMNLQGEEFVCLKSIILLNSGVYTFLSSTLKSLEEKDHIHRVLDKITDTLIHLMAKAGLTLQQQHQRLAQLLLILSHIRHMSNKGMEHLYSMKCKNVVPLYDLLLEAADAHRLHAPTSRGGASVEETDQSHLATAGSTSSHSLQKYYITGEAEGFPATAGADKKYSIGLDIGTNSVGWAVITDEYKVPSKKFKVLGNTDRHSIKKNLIGALLFDSGETAEATRLKRTARRRYTRRKNRICYLQEIFSNEMAKVDDSFFHRLEESFLVEEDKKHERHPIFGNIVDEVAYHEKYPTIYHLRKKLVDSTDKADLRLIYLALAHMIKFRGHFLIEGDLNPDNSDVDKLFIQLVQTYNQLFEENPINASGVDAKAILSARLSKSRRLENLIAQLPGEKKNGLFGNLIALSLGLTPNFKSNFDLAEDAKLQLSKDTYDDDLDNLLAQIGDQYADLFLAAKNLSDAILLSDILRVNTEITKAPLSASMIKRYDEHHQDLTLLKALVRQQLPEKYKEIFFDQSKNGYAGYIDGGASQEEFYKFIKPILEKMDGTEELLVKLNREDLLRKQRTFDNGSIPHQIHLGELHAILRRQEDFYPFLKDNREKIEKILTFRIPYYVGPLARGNSRFAWMTRKSEETITPWNFEEVVDKGASAQSFIERMTNFDKNLPNEKVLPKHSLLYEYFTVYNELTKVKYVTEGMRKPAFLSGEQKKAIVDLLFKTNRKVTVKQLKEDYFKKIECFDSVEISGVEDRFNASLGTYHDLLKIIKDKDFLDNEENEDILEDIVLTLTLFEDREMIEERLKTYAHLFDDKVMKQLKRRRYTGWGRLSRKLINGIRDKQSGKTILDFLKSDGFANRNFMQLIHDDSLTFKEDIQKAQVSGQGDSLHEHIANLAGSPAIKKGILQTVKVVDELVKVMGRHKPENIVIEMARENQTTQKGQKNSRERMKRIEEGIKELGSQILKEHPVENTQLQNEKLYLYYLQNGRDMYVDQELDINRLSDYDVDHIVPQSFLKDDSIDNKVLTRSDKNRGKSDNVPSEEVVKKMKNYWRQLLNAKLITQRKFDNLTKAERGGLSELDKAGFIKRQLVETRQITKHVAQILDSRMNTKYDENDKLIREVKVITLKSKLVSDFRKDFQFYKVREINNYHHAHDAYLNAVVGTALIKKYPKLESEFVYGDYKVYDVRKMIAKSEQEIGKATAKYFFYSNIMNFFKTEITLANGEIRKRPLIETNGETGEIVWDKGRDFATVRKVLSMPQVNIVKKTEVQTGGFSKESILPKRNSDKLIARKKDWDPKKYGGFDSPTVAYSVLVVAKVEKGKSKKLKSVKELLGITIMERSSFEKNPIDFLEAKGYKEVKKDLIIKLPKYSLFELENGRKRMLASAGELQKGNELALPSKYVNFLYLASHYEKLKGSPEDNEQKQLFVEQHKHYLDEIIEQISEFSKRVILADANLDKVLSAYNKHRDKPIREQAENIIHLFTLTNLGAPAAFKYFDTTIDRKRYTSTKEVLDATLIHQSITGLYETRIDLSQLGGDSRADPKKKRKVAGDMRAANLWPSPLMIKRSKKNSLALSLTADQMVSALLDAEPPILYSEYDPTRPFSEASMMGLLTNLADRELVHMINWAKRVPGFVDLTLHDQVHLLECAWLEILMIGLVWRSMEHPVKLLFAPNLLLDRNQGKCVEGMVEIFDMLLATSSRFRMMNLQGEEFVCLKSIILLNSGVYTFLSSTLKSLEEKDHIHRVLDKITDTLIHLMAKAGLTLQQQHQRLAQLLLILSHIRHMSNKGMEHLYSMKCKNVVPLYDLLLEAADAHRLHAPTSRGGASVEETDQSHLATAGSTSSHSLQKYYITGEAEGFPATAPAGGGSAGDMRAANLWPSPLMIKRSKKNSLALSLTADQMVSALLDAEPPILYSEYDPTRPFSEASMMGLLTNLADRELVHMINWAKRVPGFVDLTLHDQVHLLECAWLEILMIGLVWRSMEHPVKLLFAPNLLLDRNQGKCVEGMVEIFDMLLATSSRFRMMNLQGEEFVCLKSIILLNSGVYTFLSSTLKSLEEKDHIHRVLDKITDTLIHLMAKAGLTLQQQHQRLAQLLLILSHIRHMSNKGMEHLYSMKCKNVVPLYDLLLEAADAHRLHAPTSRGGASVEETDQSHLATAGSTSSHSLQKYYITGEAEGFPATA

SEQ ID NO: 274 - protein, 2668 aa, Artificial Sequence
  #Cas9 variant 25
APKKKRKVGIHGVPAATGAGDMRAANLWPSPLMIKRSKKNSLALSLTADQMVSALLDAEPPILYSEYDPTRPFSEASMMGLLTNLADRELVHMINWAKRVPGFVDLTLHDQVHLLECAWLEILMIGLVWRSMEHPVKLLFAPNLLLDRNQGKCVEGMVEIFDMLLATSSRFRMMNLQGEEFVCLKSIILLNSGVYTFLSSTLKSLEEKDHIHRVLDKITDTLIHLMAKAGLTLQQQHQRLAQLLLILSHIRHMSNKGMEHLYSMKCKNVVPLYDLLLEAADAHRLHAPTSRGGASVEETDQSHLATAGSTSSHSLQKYYITGEAEGFPATAGGSPRGGSAGDMRAANLWPSPLMIKRSKKNSLALSLTADQMVSALLDAEPPILYSEYDPTRPFSEASMMGLLTNLADRELVHMINWAKRVPGFVDLTLHDQVHLLECAWLEILMIGLVWRSMEHPVKLLFAPNLLLDRNQGKCVEGMVEIFDMLLATSSRFRMMNLQGEEFVCLKSIILLNSGVYTFLSSTLKSLEEKDHIHRVLDKITDTLIHLMAKAGLTLQQQHQRLAQLLLILSHIRHMSNKGMEHLYSMKCKNVVPLYDLLLEAADAHRLHAPTSRGGASVEETDQSHLATAGSTSSHSLQKYYITGEAEGFPATATPESGADKKYSIGLDIGTNSVGWAVITDEYKVPSKKFKVLGNTDRHSIKKNLIGALLFDSGETAEATRLKRTARRRYTRRKNRICYLQEIFSNEMAKVDDSFFHRLEESFLVEEDKKHERHPIFGNIVDEVAYHEKYPTIYHLRKKLVDSTDKADLRLIYLALAHMIKFRGHFLIEGDLNPDNSDVDKLFIQLVQTYNQLFEENPINASGVDAKAILSARLSKSRRLENLIAQLPGEKKNGLFGNLIALSLGLTPNFKSNFDLAEDAKLQLSKDTYDDDLDNLLAQIGDQYADLFLAAKNLSDAILLSDILRVNTEITKAPLSASMIKRYDEHHQDLTLLKALVRQQLPEKYKEIFFDQSKNGYAGYIDGGASQEEFYKFIKPILEKMDGTEELLVKLNREDLLRKQRTFDNGSIPHQIHLGELHAILRRQEDFYPFLKDNREKIEKILTFRIPYYVGPLARGNSRFAWMTRKSEETITPWNFEEVVDKGASAQSFIERMTNFDKNLPNEKVLPKHSLLYEYFTVYNELTKVKYVTEGMRKPAFLSGEQKKAIVDLLFKTNRKVTVKQLKEDYFKKIECFDSVEISGVEDRFNASLGTYHDLLKIIKDKDFLDNEENEDILEDIVLTLTLFEDREMIEERLKTYAHLFDDKVMKQLKRRRYTGWGRLSRKLINGIRDKQSGKTILDFLKSDGFANRNFMQLIHDDSLTFKEDIQKAQVSGQGDSLHEHIANLAGSPAIKKGILQTVKVVDELVKVMGRHKPENIVIEMARENQTTQKGQKNSRERMKRIEEGIKELGSQILKEHPVENTQLQNEKLYLYYLQNGRDMYVDQELDINRLSDYDVDHIVPQSFLKDDSIDNKVLTRSDKNRGKSDNVPSEEVVKKMKNYWRQLLNAKLITQRKFDNLTKAERGGLSELDKAGFIKRQLVETRQITKHVAQILDSRMNTKYDENDKLIREVKVITLKSKLVSDFRKDFQFYKVREINNYHHAHDAYLNAVVGTALIKKYPKLESEFVYGDYKVYDVRKMIAKSEQEIGKATAKYFFYSNIMNFFKTEITLANGEIRKRPLIETNGETGEIVWDKGRDFATVRKVLSMPQVNIVKKTEVQTGGFSKESILPKRNSDKLIARKKDWDPKKYGGFDSPTVAYSVLVVAKVEKGKSKKLKSVKELLGITIMERSSFEKNPIDFLEAKGYKEVKKDLIIKLPKYSLFELENGRKRMLASAGELQKGNELALPSKYVNFLYLASHYEKLKGSPEDNEQKQLFVEQHKHYLDEIIEQISEFSKRVILADANLDKVLSAYNKHRDKPIREQAENIIHLFTLTNLGAPAAFKYFDTTIDRKRYTSTKEVLDATLIHQSITGLYETRIDLSQLGGDSRADPKKKRKVAGDMRAANLWPSPLMIKRSKKNSLALSLTADQMVSALLDAEPPILYSEYDPTRPFSEASMMGLLTNLADRELVHMINWAKRVPGFVDLTLHDQVHLLECAWLEILMIGLVWRSMEHPVKLLFAPNLLLDRNQGKCVEGMVEIFDMLLATSSRFRMMNLQGEEFVCLKSIILLNSGVYTFLSSTLKSLEEKDHIHRVLDKITDTLIHLMAKAGLTLQQQHQRLAQLLLILSHIRHMSNKGMEHLYSMKCKNVVPLYDLLLEAADAHRLHAPTSRGGASVEETDQSHLATAGSTSSHSLQKYYITGEAEGFPATAPAGGGSAGDMRAANLWPSPLMIKRSKKNSLALSLTADQMVSALLDAEPPILYSEYDPTRPFSEASMMGLLTNLADRELVHMINWAKRVPGFVDLTLHDQVHLLECAWLEILMIGLVWRSMEHPVKLLFAPNLLLDRNQGKCVEGMVEIFDMLLATSSRFRMMNLQGEEFVCLKSIILLNSGVYTFLSSTLKSLEEKDHIHRVLDKITDTLIHLMAKAGLTLQQQHQRLAQLLLILSHIRHMSNKGMEHLYSMKCKNVVPLYDLLLEAADAHRLHAPTSRGGASVEETDQSHLATAGSTSSHSLQKYYITGEAEGFPATA

SEQ ID NO: 275 - protein, 2671 aa, Artificial Sequence
  #Cas9 variant 26
APKKKRKVGIHGVPAATGGGSAGDMRAANLWPSPLMIKRSKKNSLALSLTADQMVSALLDAEPPILYSEYDPTRPFSEASMMGLLTNLADRELVHMINWAKRVPGFVDLTLHDQVHLLECAWLEILMIGLVWRSMEHPVKLLFAPNLLLDRNQGKCVEGMVEIFDMLLATSSRFRMMNLQGEEFVCLKSIILLNSGVYTFLSSTLKSLEEKDHIHRVLDKITDTLIHLMAKAGLTLQQQHQRLAQLLLILSHIRHMSNKGMEHLYSMKCKNVVPLYDLLLEAADAHRLHAPTSRGGASVEETDQSHLATAGSTSSHSLQKYYITGEAEGFPATAGGSPRGGSAGDMRAANLWPSPLMIKRSKKNSLALSLTADQMVSALLDAEPPILYSEYDPTRPFSEASMMGLLTNLADRELVHMINWAKRVPGFVDLTLHDQVHLLECAWLEILMIGLVWRSMEHPVKLLFAPNLLLDRNQGKCVEGMVEIFDMLLATSSRFRMMNLQGEEFVCLKSIILLNSGVYTFLSSTLKSLEEKDHIHRVLDKITDTLIHLMAKAGLTLQQQHQRLAQLLLILSHIRHMSNKGMEHLYSMKCKNVVPLYDLLLEAADAHRLHAPTSRGGASVEETDQSHLATAGSTSSHSLQKYYITGEAEGFPATATPESGADKKYSIGLDIGTNSVGWAVITDEYKVPSKKFKVLGNTDRHSIKKNLIGALLFDSGETAEATRLKRTARRRYTRRKNRICYLQEIFSNEMAKVDDSFFHRLEESFLVEEDKKHERHPIFGNIVDEVAYHEKYPTIYHLRKKLVDSTDKADLRLIYLALAHMIKFRGHFLIEGDLNPDNSDVDKLFIQLVQTYNQLFEENPINASGVDAKAILSARLSKSRRLENLIAQLPGEKKNGLFGNLIALSLGLTPNFKSNFDLAEDAKLQLSKDTYDDDLDNLLAQIGDQYADLFLAAKNLSDAILLSDILRVNTEITKAPLSASMIKRYDEHHQDLTLLKALVRQQLPEKYKEIFFDQSKNGYAGYIDGGASQEEFYKFIKPILEKMDGTEELLVKLNREDLLRKQRTFDNGSIPHQIHLGELHAILRRQEDFYPFLKDNREKIEKILTFRIPYYVGPLARGNSRFAWMTRKSEETITPWNFEEVVDKGASAQSFIERMTNFDKNLPNEKVLPKHSLLYEYFTVYNELTKVKYVTEGMRKPAFLSGEQKKAIVDLLFKTNRKVTVKQLKEDYFKKIECFDSVEISGVEDRFNASLGTYHDLLKIIKDKDFLDNEENEDILEDIVLTLTLFEDREMIEERLKTYAHLFDDKVMKQLKRRRYTGWGRLSRKLINGIRDKQSGKTILDFLKSDGFANRNFMQLIHDDSLTFKEDIQKAQVSGQGDSLHEHIANLAGSPAIKKGILQTVKVVDELVKVMGRHKPENIVIEMARENQTTQKGQKNSRERMKRIEEGIKELGSQILKEHPVENTQLQNEKLYLYYLQNGRDMYVDQELDINRLSDYDVDHIVPQSFLKDDSIDNKVLTRSDKNRGKSDNVPSEEVVKKMKNYWRQLLNAKLITQRKFDNLTKAERGGLSELDKAGFIKRQLVETRQITKHVAQILDSRMNTKYDENDKLIREVKVITLKSKLVSDFRKDFQFYKVREINNYHHAHDAYLNAVVGTALIKKYPKLESEFVYGDYKVYDVRKMIAKSEQEIGKATAKYFFYSNIMNFFKTEITLANGEIRKRPLIETNGETGEIVWDKGRDFATVRKVLSMPQVNIVKKTEVQTGGFSKESILPKRNSDKLIARKKDWDPKKYGGFDSPTVAYSVLVVAKVEKGKSKKLKSVKELLGITIMERSSFEKNPIDFLEAKGYKEVKKDLIIKLPKYSLFELENGRKRMLASAGELQKGNELALPSKYVNFLYLASHYEKLKGSPEDNEQKQLFVEQHKHYLDEIIEQISEFSKRVILADANLDKVLSAYNKHRDKPIREQAENIIHLFTLTNLGAPAAFKYFDTTIDRKRYTSTKEVLDATLIHQSITGLYETRIDLSQLGGDSRADPKKKRKVAGDMRAANLWPSPLMIKRSKKNSLALSLTADQMVSALLDAEPPILYSEYDPTRPFSEASMMGLLTNLADRELVHMINWAKRVPGFVDLTLHDQVHLLECAWLEILMIGLVWRSMEHPVKLLFAPNLLLDRNQGKCVEGMVEIFDMLLATSSRFRMMNLQGEEFVCLKSIILLNSGVYTFLSSTLKSLEEKDHIHRVLDKITDTLIHLMAKAGLTLQQQHQRLAQLLLILSHIRHMSNKGMEHLYSMKCKNVVPLYDLLLEAADAHRLHAPTSRGGASVEETDQSHLATAGSTSSHSLQKYYITGEAEGFPATAPAGGGSAGDMRAANLWPSPLMIKRSKKNSLALSLTADQMVSALLDAEPPILYSEYDPTRPFSEASMMGLLTNLADRELVHMINWAKRVPGFVDLTLHDQVHLLECAWLEILMIGLVWRSMEHPVKLLFAPNLLLDRNQGKCVEGMVEIFDMLLATSSRFRMMNLQGEEFVCLKSIILLNSGVYTFLSSTLKSLEEKDHIHRVLDKITDTLIHLMAKAGLTLQQQHQRLAQLLLILSHIRHMSNKGMEHLYSMKCKNVVPLYDLLLEAADAHRLHAPTSRGGASVEETDQSHLATAGSTSSHSLQKYYITGEAEGFPATA

SEQ ID NO: 276 - protein, 2665 aa, Artificial Sequence
  #Cas9 variant 27
APKKKRKVGIHGVPAATGGGSAGDMRAANLWPSPLMIKRSKKNSLALSLTADQMVSALLDAEPPILYSEYDPTRPFSEASMMGLLTNLADRELVHMINWAKRVPGFVDLTLHDQVHLLECAWLEILMIGLVWRSMEHPVKLLFAPNLLLDRNQGKCVEGMVEIFDMLLATSSRFRMMNLQGEEFVCLKSIILLNSGVYTFLSSTLKSLEEKDHIHRVLDKITDTLIHLMAKAGLTLQQQHQRLAQLLLILSHIRHMSNKGMEHLYSMKCKNVVPLYDLLLEAADAHRLHAPTSRGGASVEETDQSHLATAGSTSSHSLQKYYITGEAEGFPATAPRGGSAGDMRAANLWPSPLMIKRSKKNSLALSLTADQMVSALLDAEPPILYSEYDPTRPFSEASMMGLLTNLADRELVHMINWAKRVPGFVDLTLHDQVHLLECAWLEILMIGLVWRSMEHPVKLLFAPNLLLDRNQGKCVEGMVEIFDMLLATSSRFRMMNLQGEEFVCLKSIILLNSGVYTFLSSTLKSLEEKDHIHRVLDKITDTLIHLMAKAGLTLQQQHQRLAQLLLILSHIRHMSNKGMEHLYSMKCKNVVPLYDLLLEAADAHRLHAPTSRGGASVEETDQSHLATAGSTSSHSLQKYYITGEAEGFPATATPESGADKKYSIGLDIGTNSVGWAVITDEYKVPSKKFKVLGNTDRHSIKKNLIGALLFDSGETAEATRLKRTARRRYTRRKNRICYLQEIFSNEMAKVDDSFFHRLEESFLVEEDKKHERHPIFGNIVDEVAYHEKYPTIYHLRKKLVDSTDKADLRLIYLALAHMIKFRGHFLIEGDLNPDNSDVDKLFIQLVQTYNQLFEENPINASGVDAKAILSARLSKSRRLENLIAQLPGEKKNGLFGNLIALSLGLTPNFKSNFDLAEDAKLQLSKDTYDDDLDNLLAQIGDQYADLFLAAKNLSDAILLSDILRVNTEITKAPLSASMIKRYDEHHQDLTLLKALVRQQLPEKYKEIFFDQSKNGYAGYIDGGASQEEFYKFIKPILEKMDGTEELLVKLNREDLLRKQRTFDNGSIPHQIHLGELHAILRRQEDFYPFLKDNREKIEKILTFRIPYYVGPLARGNSRFAWMTRKSEETITPWNFEEVVDKGASAQSFIERMTNFDKNLPNEKVLPKHSLLYEYFTVYNELTKVKYVTEGMRKPAFLSGEQKKAIVDLLFKTNRKVTVKQLKEDYFKKIECFDSVEISGVEDRFNASLGTYHDLLKIIKDKDFLDNEENEDILEDIVLTLTLFEDREMIEERLKTYAHLFDDKVMKQLKRRRYTGWGRLSRKLINGIRDKQSGKTILDFLKSDGFANRNFMQLIHDDSLTFKEDIQKAQVSGQGDSLHEHIANLAGSPAIKKGILQTVKVVDELVKVMGRHKPENIVIEMARENQTTQKGQKNSRERMKRIEEGIKELGSQILKEHPVENTQLQNEKLYLYYLQNGRDMYVDQELDINRLSDYDVDHIVPQSFLKDDSIDNKVLTRSDKNRGKSDNVPSEEVVKKMKNYWRQLLNAKLITQRKFDNLTKAERGGLSELDKAGFIKRQLVETRQITKHVAQILDSRMNTKYDENDKLIREVKVITLKSKLVSDFRKDFQFYKVREINNYHHAHDAYLNAVVGTALIKKYPKLESEFVYGDYKVYDVRKMIAKSEQEIGKATAKYFFYSNIMNFFKTEITLANGEIRKRPLIETNGETGEIVWDKGRDFATVRKVLSMPQVNIVKKTEVQTGGFSKESILPKRNSDKLIARKKDWDPKKYGGFDSPTVAYSVLVVAKVEKGKSKKLKSVKELLGITIMERSSFEKNPIDFLEAKGYKEVKKDLIIKLPKYSLFELENGRKRMLASAGELQKGNELALPSKYVNFLYLASHYEKLKGSPEDNEQKQLFVEQHKHYLDEIIEQISEFSKRVILADANLDKVLSAYNKHRDKPIREQAENIIHLFTLTNLGAPAAFKYFDTTIDRKRYTSTKEVLDATLIHQSITGLYETRIDLSQLGGDSRADPKKKRKVAGDMRAANLWPSPLMIKRSKKNSLALSLTADQMVSALLDAEPPILYSEYDPTRPFSEASMMGLLTNLADRELVHMINWAKRVPGFVDLTLHDQVHLLECAWLEILMIGLVWRSMEHPVKLLFAPNLLLDRNQGKCVEGMVEIFDMLLATSSRFRMMNLQGEEFVCLKSIILLNSGVYTFLSSTLKSLEEKDHIHRVLDKITDTLIHLMAKAGLTLQQQHQRLAQLLLILSHIRHMSNKGMEHLYSMKCKNVVPLYDLLLEAADAHRLHAPTSRGGASVEETDQSHLATAGSTSSHSLQKYYITGEAEGFPATAPAGAGDMRAANLWPSPLMIKRSKKNSLALSLTADQMVSALLDAEPPILYSEYDPTRPFSEASMMGLLTNLADRELVHMINWAKRVPGFVDLTLHDQVHLLECAWLEILMIGLVWRSMEHPVKLLFAPNLLLDRNQGKCVEGMVEIFDMLLATSSRFRMMNLQGEEFVCLKSIILLNSGVYTFLSSTLKSLEEKDHIHRVLDKITDTLIHLMAKAGLTLQQQHQRLAQLLLILSHIRHMSNKGMEHLYSMKCKNVVPLYDLLLEAADAHRLHAPTSRGGASVEETDQSHLATAGSTSSHSLQKYYITGEAEGFPATA

SEQ ID NO: 277 - protein, 2668 aa, Artificial Sequence
  #Cas9 variant 28
APKKKRKVGIHGVPAATGGGSAGDMRAANLWPSPLMIKRSKKNSLALSLTADQMVSALLDAEPPILYSEYDPTRPFSEASMMGLLTNLADRELVHMINWAKRVPGFVDLTLHDQVHLLECAWLEILMIGLVWRSMEHPVKLLFAPNLLLDRNQGKCVEGMVEIFDMLLATSSRFRMMNLQGEEFVCLKSIILLNSGVYTFLSSTLKSLEEKDHIHRVLDKITDTLIHLMAKAGLTLQQQHQRLAQLLLILSHIRHMSNKGMEHLYSMKCKNVVPLYDLLLEAADAHRLHAPTSRGGASVEETDQSHLATAGSTSSHSLQKYYITGEAEGFPATAGGSPRGGSAGDMRAANLWPSPLMIKRSKKNSLALSLTADQMVSALLDAEPPILYSEYDPTRPFSEASMMGLLTNLADRELVHMINWAKRVPGFVDLTLHDQVHLLECAWLEILMIGLVWRSMEHPVKLLFAPNLLLDRNQGKCVEGMVEIFDMLLATSSRFRMMNLQGEEFVCLKSIILLNSGVYTFLSSTLKSLEEKDHIHRVLDKITDTLIHLMAKAGLTLQQQHQRLAQLLLILSHIRHMSNKGMEHLYSMKCKNVVPLYDLLLEAADAHRLHAPTSRGGASVEETDQSHLATAGSTSSHSLQKYYITGEAEGFPATATPESGADKKYSIGLDIGTNSVGWAVITDEYKVPSKKFKVLGNTDRHSIKKNLIGALLFDSGETAEATRLKRTARRRYTRRKNRICYLQEIFSNEMAKVDDSFFHRLEESFLVEEDKKHERHPIFGNIVDEVAYHEKYPTIYHLRKKLVDSTDKADLRLIYLALAHMIKFRGHFLIEGDLNPDNSDVDKLFIQLVQTYNQLFEENPINASGVDAKAILSARLSKSRRLENLIAQLPGEKKNGLFGNLIALSLGLTPNFKSNFDLAEDAKLQLSKDTYDDDLDNLLAQIGDQYADLFLAAKNLSDAILLSDILRVNTEITKAPLSASMIKRYDEHHQDLTLLKALVRQQLPEKYKEIFFDQSKNGYAGYIDGGASQEEFYKFIKPILEKMDGTEELLVKLNREDLLRKQRTFDNGSIPHQIHLGELHAILRRQEDFYPFLKDNREKIEKILTFRIPYYVGPLARGNSRFAWMTRKSEETITPWNFEEVVDKGASAQSFIERMTNFDKNLPNEKVLPKHSLLYEYFTVYNELTKVKYVTEGMRKPAFLSGEQKKAIVDLLFKTNRKVTVKQLKEDYFKKIECFDSVEISGVEDRFNASLGTYHDLLKIIKDKDFLDNEENEDILEDIVLTLTLFEDREMIEERLKTYAHLFDDKVMKQLKRRRYTGWGRLSRKLINGIRDKQSGKTILDFLKSDGFANRNFMQLIHDDSLTFKEDIQKAQVSGQGDSLHEHIANLAGSPAIKKGILQTVKVVDELVKVMGRHKPENIVIEMARENQTTQKGQKNSRERMKRIEEGIKELGSQILKEHPVENTQLQNEKLYLYYLQNGRDMYVDQELDINRLSDYDVDHIVPQSFLKDDSIDNKVLTRSDKNRGKSDNVPSEEVVKKMKNYWRQLLNAKLITQRKFDNLTKAERGGLSELDKAGFIKRQLVETRQITKHVAQILDSRMNTKYDENDKLIREVKVITLKSKLVSDFRKDFQFYKVREINNYHHAHDAYLNAVVGTALIKKYPKLESEFVYGDYKVYDVRKMIAKSEQEIGKATAKYFFYSNIMNFFKTEITLANGEIRKRPLIETNGETGEIVWDKGRDFATVRKVLSMPQVNIVKKTEVQTGGFSKESILPKRNSDKLIARKKDWDPKKYGGFDSPTVAYSVLVVAKVEKGKSKKLKSVKELLGITIMERSSFEKNPIDFLEAKGYKEVKKDLIIKLPKYSLFELENGRKRMLASAGELQKGNELALPSKYVNFLYLASHYEKLKGSPEDNEQKQLFVEQHKHYLDEIIEQISEFSKRVILADANLDKVLSAYNKHRDKPIREQAENIIHLFTLTNLGAPAAFKYFDTTIDRKRYTSTKEVLDATLIHQSITGLYETRIDLSQLGGDSRADPKKKRKVAGDMRAANLWPSPLMIKRSKKNSLALSLTADQMVSALLDAEPPILYSEYDPTRPFSEASMMGLLTNLADRELVHMINWAKRVPGFVDLTLHDQVHLLECAWLEILMIGLVWRSMEHPVKLLFAPNLLLDRNQGKCVEGMVEIFDMLLATSSRFRMMNLQGEEFVCLKSIILLNSGVYTFLSSTLKSLEEKDHIHRVLDKITDTLIHLMAKAGLTLQQQHQRLAQLLLILSHIRHMSNKGMEHLYSMKCKNVVPLYDLLLEAADAHRLHAPTSRGGASVEETDQSHLATAGSTSSHSLQKYYITGEAEGFPATAPAGAGDMRAANLWPSPLMIKRSKKNSLALSLTADQMVSALLDAEPPILYSEYDPTRPFSEASMMGLLTNLADRELVHMINWAKRVPGFVDLTLHDQVHLLECAWLEILMIGLVWRSMEHPVKLLFAPNLLLDRNQGKCVEGMVEIFDMLLATSSRFRMMNLQGEEFVCLKSIILLNSGVYTFLSSTLKSLEEKDHIHRVLDKITDTLIHLMAKAGLTLQQQHQRLAQLLLILSHIRHMSNKGMEHLYSMKCKNVVPLYDLLLEAADAHRLHAPTSRGGASVEETDQSHLATAGSTSSHSLQKYYITGEAEGFPATA

SEQ ID NO: 278 - protein, 2665 aa, Artificial Sequence
  #Cas9 variant 29
APKKKRKVGIHGVPAATGAGDMRAANLWPSPLMIKRSKKNSLALSLTADQMVSALLDAEPPILYSEYDPTRPFSEASMMGLLTNLADRELVHMINWAKRVPGFVDLTLHDQVHLLECAWLEILMIGLVWRSMEHPVKLLFAPNLLLDRNQGKCVEGMVEIFDMLLATSSRFRMMNLQGEEFVCLKSIILLNSGVYTFLSSTLKSLEEKDHIHRVLDKITDTLIHLMAKAGLTLQQQHQRLAQLLLILSHIRHMSNKGMEHLYSMKCKNVVPLYDLLLEAADAHRLHAPTSRGGASVEETDQSHLATAGSTSSHSLQKYYITGEAEGFPATAGGSPRGGSAGDMRAANLWPSPLMIKRSKKNSLALSLTADQMVSALLDAEPPILYSEYDPTRPFSEASMMGLLTNLADRELVHMINWAKRVPGFVDLTLHDQVHLLECAWLEILMIGLVWRSMEHPVKLLFAPNLLLDRNQGKCVEGMVEIFDMLLATSSRFRMMNLQGEEFVCLKSIILLNSGVYTFLSSTLKSLEEKDHIHRVLDKITDTLIHLMAKAGLTLQQQHQRLAQLLLILSHIRHMSNKGMEHLYSMKCKNVVPLYDLLLEAADAHRLHAPTSRGGASVEETDQSHLATAGSTSSHSLQKYYITGEAEGFPATATPESGADKKYSIGLDIGTNSVGWAVITDEYKVPSKKFKVLGNTDRHSIKKNLIGALLFDSGETAEATRLKRTARRRYTRRKNRICYLQEIFSNEMAKVDDSFFHRLEESFLVEEDKKHERHPIFGNIVDEVAYHEKYPTIYHLRKKLVDSTDKADLRLIYLALAHMIKFRGHFLIEGDLNPDNSDVDKLFIQLVQTYNQLFEENPINASGVDAKAILSARLSKSRRLENLIAQLPGEKKNGLFGNLIALSLGLTPNFKSNFDLAEDAKLQLSKDTYDDDLDNLLAQIGDQYADLFLAAKNLSDAILLSDILRVNTEITKAPLSASMIKRYDEHHQDLTLLKALVRQQLPEKYKEIFFDQSKNGYAGYIDGGASQEEFYKFIKPILEKMDGTEELLVKLNREDLLRKQRTFDNGSIPHQIHLGELHAILRRQEDFYPFLKDNREKIEKILTFRIPYYVGPLARGNSRFAWMTRKSEETITPWNFEEVVDKGASAQSFIERMTNFDKNLPNEKVLPKHSLLYEYFTVYNELTKVKYVTEGMRKPAFLSGEQKKAIVDLLFKTNRKVTVKQLKEDYFKKIECFDSVEISGVEDRFNASLGTYHDLLKIIKDKDFLDNEENEDILEDIVLTLTLFEDREMIEERLKTYAHLFDDKVMKQLKRRRYTGWGRLSRKLINGIRDKQSGKTILDFLKSDGFANRNFMQLIHDDSLTFKEDIQKAQVSGQGDSLHEHIANLAGSPAIKKGILQTVKVVDELVKVMGRHKPENIVIEMARENQTTQKGQKNSRERMKRIEEGIKELGSQILKEHPVENTQLQNEKLYLYYLQNGRDMYVDQELDINRLSDYDVDHIVPQSFLKDDSIDNKVLTRSDKNRGKSDNVPSEEVVKKMKNYWRQLLNAKLITQRKFDNLTKAERGGLSELDKAGFIKRQLVETRQITKHVAQILDSRMNTKYDENDKLIREVKVITLKSKLVSDFRKDFQFYKVREINNYHHAHDAYLNAVVGTALIKKYPKLESEFVYGDYKVYDVRKMIAKSEQEIGKATAKYFFYSNIMNFFKTEITLANGEIRKRPLIETNGETGEIVWDKGRDFATVRKVLSMPQVNIVKKTEVQTGGFSKESILPKRNSDKLIARKKDWDPKKYGGFDSPTVAYSVLVVAKVEKGKSKKLKSVKELLGITIMERSSFEKNPIDFLEAKGYKEVKKDLIIKLPKYSLFELENGRKRMLASAGELQKGNELALPSKYVNFLYLASHYEKLKGSPEDNEQKQLFVEQHKHYLDEIIEQISEFSKRVILADANLDKVLSAYNKHRDKPIREQAENIIHLFTLTNLGAPAAFKYFDTTIDRKRYTSTKEVLDATLIHQSITGLYETRIDLSQLGGDSRADPKKKRKVAGDMRAANLWPSPLMIKRSKKNSLALSLTADQMVSALLDAEPPILYSEYDPTRPFSEASMMGLLTNLADRELVHMINWAKRVPGFVDLTLHDQVHLLECAWLEILMIGLVWRSMEHPVKLLFAPNLLLDRNQGKCVEGMVEIFDMLLATSSRFRMMNLQGEEFVCLKSIILLNSGVYTFLSSTLKSLEEKDHIHRVLDKITDTLIHLMAKAGLTLQQQHQRLAQLLLILSHIRHMSNKGMEHLYSMKCKNVVPLYDLLLEAADAHRLHAPTSRGGASVEETDQSHLATAGSTSSHSLQKYYITGEAEGFPATAPAGAGDMRAANLWPSPLMIKRSKKNSLALSLTADQMVSALLDAEPPILYSEYDPTRPFSEASMMGLLTNLADRELVHMINWAKRVPGFVDLTLHDQVHLLECAWLEILMIGLVWRSMEHPVKLLFAPNLLLDRNQGKCVEGMVEIFDMLLATSSRFRMMNLQGEEFVCLKSIILLNSGVYTFLSSTLKSLEEKDHIHRVLDKITDTLIHLMAKAGLTLQQQHQRLAQLLLILSHIRHMSNKGMEHLYSMKCKNVVPLYDLLLEAADAHRLHAPTSRGGASVEETDQSHLATAGSTSSHSLQKYYITGEAEGFPATA

SEQ ID NO: 279 - protein, 2668 aa, Artificial Sequence
  #Cas9 variant 30
APKKKRKVGIHGVPAATGGGSAGDMRAANLWPSPLMIKRSKKNSLALSLTADQMVSALLDAEPPILYSEYDPTRPFSEASMMGLLTNLADRELVHMINWAKRVPGFVDLTLHDQVHLLECAWLEILMIGLVWRSMEHPVKLLFAPNLLLDRNQGKCVEGMVEIFDMLLATSSRFRMMNLQGEEFVCLKSIILLNSGVYTFLSSTLKSLEEKDHIHRVLDKITDTLIHLMAKAGLTLQQQHQRLAQLLLILSHIRHMSNKGMEHLYSMKCKNVVPLYDLLLEAADAHRLHAPTSRGGASVEETDQSHLATAGSTSSHSLQKYYITGEAEGFPATAPRGGSAGDMRAANLWPSPLMIKRSKKNSLALSLTADQMVSALLDAEPPILYSEYDPTRPFSEASMMGLLTNLADRELVHMINWAKRVPGFVDLTLHDQVHLLECAWLEILMIGLVWRSMEHPVKLLFAPNLLLDRNQGKCVEGMVEIFDMLLATSSRFRMMNLQGEEFVCLKSIILLNSGVYTFLSSTLKSLEEKDHIHRVLDKITDTLIHLMAKAGLTLQQQHQRLAQLLLILSHIRHMSNKGMEHLYSMKCKNVVPLYDLLLEAADAHRLHAPTSRGGASVEETDQSHLATAGSTSSHSLQKYYITGEAEGFPATATPESGADKKYSIGLDIGTNSVGWAVITDEYKVPSKKFKVLGNTDRHSIKKNLIGALLFDSGETAEATRLKRTARRRYTRRKNRICYLQEIFSNEMAKVDDSFFHRLEESFLVEEDKKHERHPIFGNIVDEVAYHEKYPTIYHLRKKLVDSTDKADLRLIYLALAHMIKFRGHFLIEGDLNPDNSDVDKLFIQLVQTYNQLFEENPINASGVDAKAILSARLSKSRRLENLIAQLPGEKKNGLFGNLIALSLGLTPNFKSNFDLAEDAKLQLSKDTYDDDLDNLLAQIGDQYADLFLAAKNLSDAILLSDILRVNTEITKAPLSASMIKRYDEHHQDLTLLKALVRQQLPEKYKEIFFDQSKNGYAGYIDGGASQEEFYKFIKPILEKMDGTEELLVKLNREDLLRKQRTFDNGSIPHQIHLGELHAILRRQEDFYPFLKDNREKIEKILTFRIPYYVGPLARGNSRFAWMTRKSEETITPWNFEEVVDKGASAQSFIERMTNFDKNLPNEKVLPKHSLLYEYFTVYNELTKVKYVTEGMRKPAFLSGEQKKAIVDLLFKTNRKVTVKQLKEDYFKKIECFDSVEISGVEDRFNASLGTYHDLLKIIKDKDFLDNEENEDILEDIVLTLTLFEDREMIEERLKTYAHLFDDKVMKQLKRRRYTGWGRLSRKLINGIRDKQSGKTILDFLKSDGFANRNFMQLIHDDSLTFKEDIQKAQVSGQGDSLHEHIANLAGSPAIKKGILQTVKVVDELVKVMGRHKPENIVIEMARENQTTQKGQKNSRERMKRIEEGIKELGSQILKEHPVENTQLQNEKLYLYYLQNGRDMYVDQELDINRLSDYDVDHIVPQSFLKDDSIDNKVLTRSDKNRGKSDNVPSEEVVKKMKNYWRQLLNAKLITQRKFDNLTKAERGGLSELDKAGFIKRQLVETRQITKHVAQILDSRMNTKYDENDKLIREVKVITLKSKLVSDFRKDFQFYKVREINNYHHAHDAYLNAVVGTALIKKYPKLESEFVYGDYKVYDVRKMIAKSEQEIGKATAKYFFYSNIMNFFKTEITLANGEIRKRPLIETNGETGEIVWDKGRDFATVRKVLSMPQVNIVKKTEVQTGGFSKESILPKRNSDKLIARKKDWDPKKYGGFDSPTVAYSVLVVAKVEKGKSKKLKSVKELLGITIMERSSFEKNPIDFLEAKGYKEVKKDLIIKLPKYSLFELENGRKRMLASAGELQKGNELALPSKYVNFLYLASHYEKLKGSPEDNEQKQLFVEQHKHYLDEIIEQISEFSKRVILADANLDKVLSAYNKHRDKPIREQAENIIHLFTLTNLGAPAAFKYFDTTIDRKRYTSTKEVLDATLIHQSITGLYETRIDLSQLGGDSRADPKKKRKVAGDMRAANLWPSPLMIKRSKKNSLALSLTADQMVSALLDAEPPILYSEYDPTRPFSEASMMGLLTNLADRELVHMINWAKRVPGFVDLTLHDQVHLLECAWLEILMIGLVWRSMEHPVKLLFAPNLLLDRNQGKCVEGMVEIFDMLLATSSRFRMMNLQGEEFVCLKSIILLNSGVYTFLSSTLKSLEEKDHIHRVLDKITDTLIHLMAKAGLTLQQQHQRLAQLLLILSHIRHMSNKGMEHLYSMKCKNVVPLYDLLLEAADAHRLHAPTSRGGASVEETDQSHLATAGSTSSHSLQKYYITGEAEGFPATAPAGGGSAGDMRAANLWPSPLMIKRSKKNSLALSLTADQMVSALLDAEPPILYSEYDPTRPFSEASMMGLLTNLADRELVHMINWAKRVPGFVDLTLHDQVHLLECAWLEILMIGLVWRSMEHPVKLLFAPNLLLDRNQGKCVEGMVEIFDMLLATSSRFRMMNLQGEEFVCLKSIILLNSGVYTFLSSTLKSLEEKDHIHRVLDKITDTLIHLMAKAGLTLQQQHQRLAQLLLILSHIRHMSNKGMEHLYSMKCKNVVPLYDLLLEAADAHRLHAPTSRGGASVEETDQSHLATAGSTSSHSLQKYYITGEAEGFPATA

SEQ ID NO: 280 - protein, 2008 aa, Artificial Sequence
  Cas9 variant 17 linkers
SRADPKKKRKVPRAGDMRAANLWPSPLMIKRSKKNSLALSLTADQMVSALLDAEPPILYSEYDPTRPFSEASMMGLLTNLADRELVHMINWAKRVPGFVDLTLHDQVHLLECAWLEILMIGLVWRSMEHPVKLLFAPNLLLDRNQGKCVEGMVEIFDMLLATSSRFRMMNLQGEEFVCLKSIILLNSGVYTFLSSTLKSLEEKDHIHRVLDKITDTLIHLMAKAGLTLQQQHQRLAQLLLILSHIRHMSNKGMEHLYSMKCKNVVPLYDLLLEAADAHRLHAPTSRGGASVEETDQSHLATAGSTSSHSLQKYYITGEAEGFPATAPGDKKYSIGLDIGTNSVGWAVITDEYKVPSKKFKVLGNTDRHSIKKNLIGALLFDSGETAEATRLKRTARRRYTRRKNRICYLQEIFSNEMAKVDDSFFHRLEESFLVEEDKKHERHPIFGNIVDEVAYHEKYPTIYHLRKKLVDSTDKADLRLIYLALAHMIKFRGHFLIEGDLNPDNSDVDKLFIQLVQTYNQLFEENPINASGVDAKAILSARLSKSRRLENLIAQLPGEKKNGLFGNLIALSLGLTPNFKSNFDLAEDAKLQLSKDTYDDDLDNLLAQIGDQYADLFLAAKNLSDAILLSDILRVNTEITKAPLSASMIKRYDEHHQDLTLLKALVRQQLPEKYKEIFFDQSKNGYAGYIDGGASQEEFYKFIKPILEKMDGTEELLVKLNREDLLRKQRTFDNGSIPHQIHLGELHAILRRQEDFYPFLKDNREKIEKILTFRIPYYVGPLARGNSRFAWMTRKSEETITPWNFEEVVDKGASAQSFIERMTNFDKNLPNEKVLPKHSLLYEYFTVYNELTKVKYVTEGMRKPAFLSGEQKKAIVDLLFKTNRKVTVKQLKEDYFKKIECFDSVEISGVEDRFNASLGTYHDLLKIIKDKDFLDNEENEDILEDIVLTLTLFEDREMIEERLKTYAHLFDDKVMKQLKRRRYTGWGRLSRKLINGIRDKQSGKTILDFLKSDGFANRNFMQLIHDDSLTFKEDIQKAQVSGQGDSLHEHIANLAGSPAIKKGILQTVKVVDELVKVMGRHKPENIVIEMARENQTTQKGQKNSRERMKRIEEGIKELGSQILKEHPVENTQLQNEKLYLYYLQNGRDMYVDQELDINRLSDYDVDHIVPQSFLKDDSIDNKVLTRSDKNRGKSDNVPSEEVVKKMKNYWRQLLNAKLITQRKFDNLTKAERGGLSELDKAGFIKRQLVETRQITKHVAQILDSRMNTKYDENDKLIREVKVITLKSKLVSDFRKDFQFYKVREINNYHHAHDAYLNAVVGTALIKKYPKLESEFVYGDYKVYDVRKMIAKSEQEIGKATAKYFFYSNIMNFFKTEITLANGEIRKRPLIETNGETGEIVWDKGRDFATVRKVLSMPQVNIVKKTEVQTGGFSKESILPKRNSDKLIARKKDWDPKKYGGFDSPTVAYSVLVVAKVEKGKSKKLKSVKELLGITIMERSSFEKNPIDFLEAKGYKEVKKDLIIKLPKYSLFELENGRKRMLASAGELQKGNELALPSKYVNFLYLASHYEKLKGSPEDNEQKQLFVEQHKHYLDEIIEQISEFSKRVILADANLDKVLSAYNKHRDKPIREQAENIIHLFTLTNLGAPAAFKYFDTTIDRKRYTSTKEVLDATLIHQSITGLYETRIDLSQLGGDAGDMRAANLWPSPLMIKRSKKNSLALSLTADQMVSALLDAEPPILYSEYDPTRPFSEASMMGLLTNLADRELVHMINWAKRVPGFVDLTLHDQVHLLECAWLEILMIGLVWRSMEHPVKLLFAPNLLLDRNQGKCVEGMVEIFDMLLATSSRFRMMNLQGEEFVCLKSIILLNSGVYTFLSSTLKSLEEKDHIHRVLDKITDTLIHLMAKAGLTLQQQHQRLAQLLLILSHIRHMSNKGMEHLYSMKCKNVVPLYDLLLEAADAHRLHAPTSRGGASVEETDQSHLATAGSTSSHSLQKYYITGEAEGFPATA

SEQ ID NO: 281 - protein, 2012 aa, Artificial Sequence
  Cas9 variant 2 linkers
SRADPKKKRKVTGAGDMRAANLWPSPLMIKRSKKNSLALSLTADQMVSALLDAEPPILYSEYDPTRPFSEASMMGLLTNLADRELVHMINWAKRVPGFVDLTLHDQVHLLECAWLEILMIGLVWRSMEHPVKLLFAPNLLLDRNQGKCVEGMVEIFDMLLATSSRFRMMNLQGEEFVCLKSIILLNSGVYTFLSSTLKSLEEKDHIHRVLDKITDTLIHLMAKAGLTLQQQHQRLAQLLLILSHIRHMSNKGMEHLYSMKCKNVVPLYDLLLEAADAHRLHAPTSRGGASVEETDQSHLATAGSTSSHSLQKYYITGEAEGFPATASGSEGADKKYSIGLDIGTNSVGWAVITDEYKVPSKKFKVLGNTDRHSIKKNLIGALLFDSGETAEATRLKRTARRRYTRRKNRICYLQEIFSNEMAKVDDSFFHRLEESFLVEEDKKHERHPIFGNIVDEVAYHEKYPTIYHLRKKLVDSTDKADLRLIYLALAHMIKFRGHFLIEGDLNPDNSDVDKLFIQLVQTYNQLFEENPINASGVDAKAILSARLSKSRRLENLIAQLPGEKKNGLFGNLIALSLGLTPNFKSNFDLAEDAKLQLSKDTYDDDLDNLLAQIGDQYADLFLAAKNLSDAILLSDILRVNTEITKAPLSASMIKRYDEHHQDLTLLKALVRQQLPEKYKEIFFDQSKNGYAGYIDGGASQEEFYKFIKPILEKMDGTEELLVKLNREDLLRKQRTFDNGSIPHQIHLGELHAILRRQEDFYPFLKDNREKIEKILTFRIPYYVGPLARGNSRFAWMTRKSEETITPWNFEEVVDKGASAQSFIERMTNFDKNLPNEKVLPKHSLLYEYFTVYNELTKVKYVTEGMRKPAFLSGEQKKAIVDLLFKTNRKVTVKQLKEDYFKKIECFDSVEISGVEDRFNASLGTYHDLLKIIKDKDFLDNEENEDILEDIVLTLTLFEDREMIEERLKTYAHLFDDKVMKQLKRRRYTGWGRLSRKLINGIRDKQSGKTILDFLKSDGFANRNFMQLIHDDSLTFKEDIQKAQVSGQGDSLHEHIANLAGSPAIKKGILQTVKVVDELVKVMGRHKPENIVIEMARENQTTQKGQKNSRERMKRIEEGIKELGSQILKEHPVENTQLQNEKLYLYYLQNGRDMYVDQELDINRLSDYDVDHIVPQSFLKDDSIDNKVLTRSDKNRGKSDNVPSEEVVKKMKNYWRQLLNAKLITQRKFDNLTKAERGGLSELDKAGFIKRQLVETRQITKHVAQILDSRMNTKYDENDKLIREVKVITLKSKLVSDFRKDFQFYKVREINNYHHAHDAYLNAVVGTALIKKYPKLESEFVYGDYKVYDVRKMIAKSEQEIGKATAKYFFYSNIMNFFKTEITLANGEIRKRPLIETNGETGEIVWDKGRDFATVRKVLSMPQVNIVKKTEVQTGGFSKESILPKRNSDKLIARKKDWDPKKYGGFDSPTVAYSVLVVAKVEKGKSKKLKSVKELLGITIMERSSFEKNPIDFLEAKGYKEVKKDLIIKLPKYSLFELENGRKRMLASAGELQKGNELALPSKYVNFLYLASHYEKLKGSPEDNEQKQLFVEQHKHYLDEIIEQISEFSKRVILADANLDKVLSAYNKHRDKPIREQAENIIHLFTLTNLGAPAAFKYFDTTIDRKRYTSTKEVLDATLIHQSITGLYETRIDLSQLGGDAGDMRAANLWPSPLMIKRSKKNSLALSLTADQMVSALLDAEPPILYSEYDPTRPFSEASMMGLLTNLADRELVHMINWAKRVPGFVDLTLHDQVHLLECAWLEILMIGLVWRSMEHPVKLLFAPNLLLDRNQGKCVEGMVEIFDMLLATSSRFRMMNLQGEEFVCLKSIILLNSGVYTFLSSTLKSLEEKDHIHRVLDKITDTLIHLMAKAGLTLQQQHQRLAQLLLILSHIRHMSNKGMEHLYSMKCKNVVPLYDLLLEAADAHRLHAPTSRGGASVEETDQSHLATAGSTSSHSLQKYYITGEAEGFPATA

SEQ ID NO: 282 - protein, 2015 aa, Artificial Sequence
  Cas9 variant 9 linkers
SRADPKKKRKVTGAGDMRAANLWPSPLMIKRSKKNSLALSLTADQMVSALLDAEPPILYSEYDPTRPFSEASMMGLLTNLADRELVHMINWAKRVPGFVDLTLHDQVHLLECAWLEILMIGLVWRSMEHPVKLLFAPNLLLDRNQGKCVEGMVEIFDMLLATSSRFRMMNLQGEEFVCLKSIILLNSGVYTFLSSTLKSLEEKDHIHRVLDKITDTLIHLMAKAGLTLQQQHQRLAQLLLILSHIRHMSNKGMEHLYSMKCKNVVPLYDLLLEAADAHRLHAPTSRGGASVEETDQSHLATAGSTSSHSLQKYYITGEAEGFPATAGASGSKTPGDKKYSIGLDIGTNSVGWAVITDEYKVPSKKFKVLGNTDRHSIKKNLIGALLFDSGETAEATRLKRTARRRYTRRKNRICYLQEIFSNEMAKVDDSFFHRLEESFLVEEDKKHERHPIFGNIVDEVAYHEKYPTIYHLRKKLVDSTDKADLRLIYLALAHMIKFRGHFLIEGDLNPDNSDVDKLFIQLVQTYNQLFEENPINASGVDAKAILSARLSKSRRLENLIAQLPGEKKNGLFGNLIALSLGLTPNFKSNFDLAEDAKLQLSKDTYDDDLDNLLAQIGDQYADLFLAAKNLSDAILLSDILRVNTEITKAPLSASMIKRYDEHHQDLTLLKALVRQQLPEKYKEIFFDQSKNGYAGYIDGGASQEEFYKFIKPILEKMDGTEELLVKLNREDLLRKQRTFDNGSIPHQIHLGELHAILRRQEDFYPFLKDNREKIEKILTFRIPYYVGPLARGNSRFAWMTRKSEETITPWNFEEVVDKGASAQSFIERMTNFDKNLPNEKVLPKHSLLYEYFTVYNELTKVKYVTEGMRKPAFLSGEQKKAIVDLLFKTNRKVTVKQLKEDYFKKIECFDSVEISGVEDRFNASLGTYHDLLKIIKDKDFLDNEENEDILEDIVLTLTLFEDREMIEERLKTYAHLFDDKVMKQLKRRRYTGWGRLSRKLINGIRDKQSGKTILDFLKSDGFANRNFMQLIHDDSLTFKEDIQKAQVSGQGDSLHEHIANLAGSPAIKKGILQTVKVVDELVKVMGRHKPENIVIEMARENQTTQKGQKNSRERMKRIEEGIKELGSQILKEHPVENTQLQNEKLYLYYLQNGRDMYVDQELDINRLSDYDVDHIVPQSFLKDDSIDNKVLTRSDKNRGKSDNVPSEEVVKKMKNYWRQLLNAKLITQRKFDNLTKAERGGLSELDKAGFIKRQLVETRQITKHVAQILDSRMNTKYDENDKLIREVKVITLKSKLVSDFRKDFQFYKVREINNYHHAHDAYLNAVVGTALIKKYPKLESEFVYGDYKVYDVRKMIAKSEQEIGKATAKYFFYSNIMNFFKTEITLANGEIRKRPLIETNGETGEIVWDKGRDFATVRKVLSMPQVNIVKKTEVQTGGFSKESILPKRNSDKLIARKKDWDPKKYGGFDSPTVAYSVLVVAKVEKGKSKKLKSVKELLGITIMERSSFEKNPIDFLEAKGYKEVKKDLIIKLPKYSLFELENGRKRMLASAGELQKGNELALPSKYVNFLYLASHYEKLKGSPEDNEQKQLFVEQHKHYLDEIIEQISEFSKRVILADANLDKVLSAYNKHRDKPIREQAENIIHLFTLTNLGAPAAFKYFDTTIDRKRYTSTKEVLDATLIHQSITGLYETRIDLSQLGGDAGDMRAANLWPSPLMIKRSKKNSLALSLTADQMVSALLDAEPPILYSEYDPTRPFSEASMMGLLTNLADRELVHMINWAKRVPGFVDLTLHDQVHLLECAWLEILMIGLVWRSMEHPVKLLFAPNLLLDRNQGKCVEGMVEIFDMLLATSSRFRMMNLQGEEFVCLKSIILLNSGVYTFLSSTLKSLEEKDHIHRVLDKITDTLIHLMAKAGLTLQQQHQRLAQLLLILSHIRHMSNKGMEHLYSMKCKNVVPLYDLLLEAADAHRLHAPTSRGGASVEETDQSHLATAGSTSSHSLQKYYITGEAEGFPATA

SEQ ID NO: 283 - protein, 2020 aa, Artificial Sequence
  Cas9 variant 1 linkers
SRADPKKKRKVTGAGDMRAANLWPSPLMIKRSKKNSLALSLTADQMVSALLDAEPPILYSEYDPTRPFSEASMMGLLTNLADRELVHMINWAKRVPGFVDLTLHDQVHLLECAWLEILMIGLVWRSMEHPVKLLFAPNLLLDRNQGKCVEGMVEIFDMLLATSSRFRMMNLQGEEFVCLKSIILLNSGVYTFLSSTLKSLEEKDHIHRVLDKITDTLIHLMAKAGLTLQQQHQRLAQLLLILSHIRHMSNKGMEHLYSMKCKNVVPLYDLLLEAADAHRLHAPTSRGGASVEETDQSHLATAGSTSSHSLQKYYITGEAEGFPATASGSETPGTSESAGADKKYSIGLDIGTNSVGWAVITDEYKVPSKKFKVLGNTDRHSIKKNLIGALLFDSGETAEATRLKRTARRRYTRRKNRICYLQEIFSNEMAKVDDSFFHRLEESFLVEEDKKHERHPIFGNIVDEVAYHEKYPTIYHLRKKLVDSTDKADLRLIYLALAHMIKFRGHFLIEGDLNPDNSDVDKLFIQLVQTYNQLFEENPINASGVDAKAILSARLSKSRRLENLIAQLPGEKKNGLFGNLIALSLGLTPNFKSNFDLAEDAKLQLSKDTYDDDLDNLLAQIGDQYADLFLAAKNLSDAILLSDILRVNTEITKAPLSASMIKRYDEHHQDLTLLKALVRQQLPEKYKEIFFDQSKNGYAGYIDGGASQEEFYKFIKPILEKMDGTEELLVKLNREDLLRKQRTFDNGSIPHQIHLGELHAILRRQEDFYPFLKDNREKIEKILTFRIPYYVGPLARGNSRFAWMTRKSEETITPWNFEEVVDKGASAQSFIERMTNFDKNLPNEKVLPKHSLLYEYFTVYNELTKVKYVTEGMRKPAFLSGEQKKAIVDLLFKTNRKVTVKQLKEDYFKKIECFDSVEISGVEDRFNASLGTYHDLLKIIKDKDFLDNEENEDILEDIVLTLTLFEDREMIEERLKTYAHLFDDKVMKQLKRRRYTGWGRLSRKLINGIRDKQSGKTILDFLKSDGFANRNFMQLIHDDSLTFKEDIQKAQVSGQGDSLHEHIANLAGSPAIKKGILQTVKVVDELVKVMGRHKPENIVIEMARENQTTQKGQKNSRERMKRIEEGIKELGSQILKEHPVENTQLQNEKLYLYYLQNGRDMYVDQELDINRLSDYDVDHIVPQSFLKDDSIDNKVLTRSDKNRGKSDNVPSEEVVKKMKNYWRQLLNAKLITQRKFDNLTKAERGGLSELDKAGFIKRQLVETRQITKHVAQILDSRMNTKYDENDKLIREVKVITLKSKLVSDFRKDFQFYKVREINNYHHAHDAYLNAVVGTALIKKYPKLESEFVYGDYKVYDVRKMIAKSEQEIGKATAKYFFYSNIMNFFKTEITLANGEIRKRPLIETNGETGEIVWDKGRDFATVRKVLSMPQVNIVKKTEVQTGGFSKESILPKRNSDKLIARKKDWDPKKYGGFDSPTVAYSVLVVAKVEKGKSKKLKSVKELLGITIMERSSFEKNPIDFLEAKGYKEVKKDLIIKLPKYSLFELENGRKRMLASAGELQKGNELALPSKYVNFLYLASHYEKLKGSPEDNEQKQLFVEQHKHYLDEIIEQISEFSKRVILADANLDKVLSAYNKHRDKPIREQAENIIHLFTLTNLGAPAAFKYFDTTIDRKRYTSTKEVLDATLIHQSITGLYETRIDLSQLGGDAGDMRAANLWPSPLMIKRSKKNSLALSLTADQMVSALLDAEPPILYSEYDPTRPFSEASMMGLLTNLADRELVHMINWAKRVPGFVDLTLHDQVHLLECAWLEILMIGLVWRSMEHPVKLLFAPNLLLDRNQGKCVEGMVEIFDMLLATSSRFRMMNLQGEEFVCLKSIILLNSGVYTFLSSTLKSLEEKDHIHRVLDKITDTLIHLMAKAGLTLQQQHQRLAQLLLILSHIRHMSNKGMEHLYSMKCKNVVPLYDLLLEAADAHRLHAPTSRGGASVEETDQSHLATAGSTSSHSLQKYYITGEAEGFPATA

SEQ ID NO: 284 - protein, 2019 aa, Artificial Sequence
  Cas9 variant 5 linkers
SRADPKKKRKVTGAGDMRAANLWPSPLMIKRSKKNSLALSLTADQMVSALLDAEPPILYSEYDPTRPFSEASMMGLLTNLADRELVHMINWAKRVPGFVDLTLHDQVHLLECAWLEILMIGLVWRSMEHPVKLLFAPNLLLDRNQGKCVEGMVEIFDMLLATSSRFRMMNLQGEEFVCLKSIILLNSGVYTFLSSTLKSLEEKDHIHRVLDKITDTLIHLMAKAGLTLQQQHQRLAQLLLILSHIRHMSNKGMEHLYSMKCKNVVPLYDLLLEAADAHRLHAPTSRGGASVEETDQSHLATAGSTSSHSLQKYYITGEAEGFPATASGSETPGTGPGGADKKYSIGLDIGTNSVGWAVITDEYKVPSKKFKVLGNTDRHSIKKNLIGALLFDSGETAEATRLKRTARRRYTRRKNRICYLQEIFSNEMAKVDDSFFHRLEESFLVEEDKKHERHPIFGNIVDEVAYHEKYPTIYHLRKKLVDSTDKADLRLIYLALAHMIKFRGHFLIEGDLNPDNSDVDKLFIQLVQTYNQLFEENPINASGVDAKAILSARLSKSRRLENLIAQLPGEKKNGLFGNLIALSLGLTPNFKSNFDLAEDAKLQLSKDTYDDDLDNLLAQIGDQYADLFLAAKNLSDAILLSDILRVNTEITKAPLSASMIKRYDEHHQDLTLLKALVRQQLPEKYKEIFFDQSKNGYAGYIDGGASQEEFYKFIKPILEKMDGTEELLVKLNREDLLRKQRTFDNGSIPHQIHLGELHAILRRQEDFYPFLKDNREKIEKILTFRIPYYVGPLARGNSRFAWMTRKSEETITPWNFEEVVDKGASAQSFIERMTNFDKNLPNEKVLPKHSLLYEYFTVYNELTKVKYVTEGMRKPAFLSGEQKKAIVDLLFKTNRKVTVKQLKEDYFKKIECFDSVEISGVEDRFNASLGTYHDLLKIIKDKDFLDNEENEDILEDIVLTLTLFEDREMIEERLKTYAHLFDDKVMKQLKRRRYTGWGRLSRKLINGIRDKQSGKTILDFLKSDGFANRNFMQLIHDDSLTFKEDIQKAQVSGQGDSLHEHIANLAGSPAIKKGILQTVKVVDELVKVMGRHKPENIVIEMARENQTTQKGQKNSRERMKRIEEGIKELGSQILKEHPVENTQLQNEKLYLYYLQNGRDMYVDQELDINRLSDYDVDHIVPQSFLKDDSIDNKVLTRSDKNRGKSDNVPSEEVVKKMKNYWRQLLNAKLITQRKFDNLTKAERGGLSELDKAGFIKRQLVETRQITKHVAQILDSRMNTKYDENDKLIREVKVITLKSKLVSDFRKDFQFYKVREINNYHHAHDAYLNAVVGTALIKKYPKLESEFVYGDYKVYDVRKMIAKSEQEIGKATAKYFFYSNIMNFFKTEITLANGEIRKRPLIETNGETGEIVWDKGRDFATVRKVLSMPQVNIVKKTEVQTGGFSKESILPKRNSDKLIARKKDWDPKKYGGFDSPTVAYSVLVVAKVEKGKSKKLKSVKELLGITIMERSSFEKNPIDFLEAKGYKEVKKDLIIKLPKYSLFELENGRKRMLASAGELQKGNELALPSKYVNFLYLASHYEKLKGSPEDNEQKQLFVEQHKHYLDEIIEQISEFSKRVILADANLDKVLSAYNKHRDKPIREQAENIIHLFTLTNLGAPAAFKYFDTTIDRKRYTSTKEVLDATLIHQSITGLYETRIDLSQLGGDAGDMRAANLWPSPLMIKRSKKNSLALSLTADQMVSALLDAEPPILYSEYDPTRPFSEASMMGLLTNLADRELVHMINWAKRVPGFVDLTLHDQVHLLECAWLEILMIGLVWRSMEHPVKLLFAPNLLLDRNQGKCVEGMVEIFDMLLATSSRFRMMNLQGEEFVCLKSIILLNSGVYTFLSSTLKSLEEKDHIHRVLDKITDTLIHLMAKAGLTLQQQHQRLAQLLLILSHIRHMSNKGMEHLYSMKCKNVVPLYDLLLEAADAHRLHAPTSRGGASVEETDQSHLATAGSTSSHSLQKYYITGEAEGFPATA

SEQ ID NO: 285 - protein, 2016 aa, Artificial Sequence
  Cas9 variant 6 linkers
SRADPKKKRKVTGAGDMRAANLWPSPLMIKRSKKNSLALSLTADQMVSALLDAEPPILYSEYDPTRPFSEASMMGLLTNLADRELVHMINWAKRVPGFVDLTLHDQVHLLECAWLEILMIGLVWRSMEHPVKLLFAPNLLLDRNQGKCVEGMVEIFDMLLATSSRFRMMNLQGEEFVCLKSIILLNSGVYTFLSSTLKSLEEKDHIHRVLDKITDTLIHLMAKAGLTLQQQHQRLAQLLLILSHIRHMSNKGMEHLYSMKCKNVVPLYDLLLEAADAHRLHAPTSRGGASVEETDQSHLATAGSTSSHSLQKYYITGEAEGFPATASESATPESGADKKYSIGLDIGTNSVGWAVITDEYKVPSKKFKVLGNTDRHSIKKNLIGALLFDSGETAEATRLKRTARRRYTRRKNRICYLQEIFSNEMAKVDDSFFHRLEESFLVEEDKKHERHPIFGNIVDEVAYHEKYPTIYHLRKKLVDSTDKADLRLIYLALAHMIKFRGHFLIEGDLNPDNSDVDKLFIQLVQTYNQLFEENPINASGVDAKAILSARLSKSRRLENLIAQLPGEKKNGLFGNLIALSLGLTPNFKSNFDLAEDAKLQLSKDTYDDDLDNLLAQIGDQYADLFLAAKNLSDAILLSDILRVNTEITKAPLSASMIKRYDEHHQDLTLLKALVRQQLPEKYKEIFFDQSKNGYAGYIDGGASQEEFYKFIKPILEKMDGTEELLVKLNREDLLRKQRTFDNGSIPHQIHLGELHAILRRQEDFYPFLKDNREKIEKILTFRIPYYVGPLARGNSRFAWMTRKSEETITPWNFEEVVDKGASAQSFIERMTNFDKNLPNEKVLPKHSLLYEYFTVYNELTKVKYVTEGMRKPAFLSGEQKKAIVDLLFKTNRKVTVKQLKEDYFKKIECFDSVEISGVEDRFNASLGTYHDLLKIIKDKDFLDNEENEDILEDIVLTLTLFEDREMIEERLKTYAHLFDDKVMKQLKRRRYTGWGRLSRKLINGIRDKQSGKTILDFLKSDGFANRNFMQLIHDDSLTFKEDIQKAQVSGQGDSLHEHIANLAGSPAIKKGILQTVKVVDELVKVMGRHKPENIVIEMARENQTTQKGQKNSRERMKRIEEGIKELGSQILKEHPVENTQLQNEKLYLYYLQNGRDMYVDQELDINRLSDYDVDHIVPQSFLKDDSIDNKVLTRSDKNRGKSDNVPSEEVVKKMKNYWRQLLNAKLITQRKFDNLTKAERGGLSELDKAGFIKRQLVETRQITKHVAQILDSRMNTKYDENDKLIREVKVITLKSKLVSDFRKDFQFYKVREINNYHHAHDAYLNAVVGTALIKKYPKLESEFVYGDYKVYDVRKMIAKSEQEIGKATAKYFFYSNIMNFFKTEITLANGEIRKRPLIETNGETGEIVWDKGRDFATVRKVLSMPQVNIVKKTEVQTGGFSKESILPKRNSDKLIARKKDWDPKKYGGFDSPTVAYSVLVVAKVEKGKSKKLKSVKELLGITIMERSSFEKNPIDFLEAKGYKEVKKDLIIKLPKYSLFELENGRKRMLASAGELQKGNELALPSKYVNFLYLASHYEKLKGSPEDNEQKQLFVEQHKHYLDEIIEQISEFSKRVILADANLDKVLSAYNKHRDKPIREQAENIIHLFTLTNLGAPAAFKYFDTTIDRKRYTSTKEVLDATLIHQSITGLYETRIDLSQLGGDAGDMRAANLWPSPLMIKRSKKNSLALSLTADQMVSALLDAEPPILYSEYDPTRPFSEASMMGLLTNLADRELVHMINWAKRVPGFVDLTLHDQVHLLECAWLEILMIGLVWRSMEHPVKLLFAPNLLLDRNQGKCVEGMVEIFDMLLATSSRFRMMNLQGEEFVCLKSIILLNSGVYTFLSSTLKSLEEKDHIHRVLDKITDTLIHLMAKAGLTLQQQHQRLAQLLLILSHIRHMSNKGMEHLYSMKCKNVVPLYDLLLEAADAHRLHAPTSRGGASVEETDQSHLATAGSTSSHSLQKYYITGEAEGFPATA

SEQ ID NO: 286 - protein, 2019 aa, Artificial Sequence
  Cas9 variant 4 linkers
SRADPKKKRKVTGAGDMRAANLWPSPLMIKRSKKNSLALSLTADQMVSALLDAEPPILYSEYDPTRPFSEASMMGLLTNLADRELVHMINWAKRVPGFVDLTLHDQVHLLECAWLEILMIGLVWRSMEHPVKLLFAPNLLLDRNQGKCVEGMVEIFDMLLATSSRFRMMNLQGEEFVCLKSIILLNSGVYTFLSSTLKSLEEKDHIHRVLDKITDTLIHLMAKAGLTLQQQHQRLAQLLLILSHIRHMSNKGMEHLYSMKCKNVVPLYDLLLEAADAHRLHAPTSRGGASVEETDQSHLATAGSTSSHSLQKYYITGEAEGFPATAGTSESATPESGGADKKYSIGLDIGTNSVGWAVITDEYKVPSKKFKVLGNTDRHSIKKNLIGALLFDSGETAEATRLKRTARRRYTRRKNRICYLQEIFSNEMAKVDDSFFHRLEESFLVEEDKKHERHPIFGNIVDEVAYHEKYPTIYHLRKKLVDSTDKADLRLIYLALAHMIKFRGHFLIEGDLNPDNSDVDKLFIQLVQTYNQLFEENPINASGVDAKAILSARLSKSRRLENLIAQLPGEKKNGLFGNLIALSLGLTPNFKSNFDLAEDAKLQLSKDTYDDDLDNLLAQIGDQYADLFLAAKNLSDAILLSDILRVNTEITKAPLSASMIKRYDEHHQDLTLLKALVRQQLPEKYKEIFFDQSKNGYAGYIDGGASQEEFYKFIKPILEKMDGTEELLVKLNREDLLRKQRTFDNGSIPHQIHLGELHAILRRQEDFYPFLKDNREKIEKILTFRIPYYVGPLARGNSRFAWMTRKSEETITPWNFEEVVDKGASAQSFIERMTNFDKNLPNEKVLPKHSLLYEYFTVYNELTKVKYVTEGMRKPAFLSGEQKKAIVDLLFKTNRKVTVKQLKEDYFKKIECFDSVEISGVEDRFNASLGTYHDLLKIIKDKDFLDNEENEDILEDIVLTLTLFEDREMIEERLKTYAHLFDDKVMKQLKRRRYTGWGRLSRKLINGIRDKQSGKTILDFLKSDGFANRNFMQLIHDDSLTFKEDIQKAQVSGQGDSLHEHIANLAGSPAIKKGILQTVKVVDELVKVMGRHKPENIVIEMARENQTTQKGQKNSRERMKRIEEGIKELGSQILKEHPVENTQLQNEKLYLYYLQNGRDMYVDQELDINRLSDYDVDHIVPQSFLKDDSIDNKVLTRSDKNRGKSDNVPSEEVVKKMKNYWRQLLNAKLITQRKFDNLTKAERGGLSELDKAGFIKRQLVETRQITKHVAQILDSRMNTKYDENDKLIREVKVITLKSKLVSDFRKDFQFYKVREINNYHHAHDAYLNAVVGTALIKKYPKLESEFVYGDYKVYDVRKMIAKSEQEIGKATAKYFFYSNIMNFFKTEITLANGEIRKRPLIETNGETGEIVWDKGRDFATVRKVLSMPQVNIVKKTEVQTGGFSKESILPKRNSDKLIARKKDWDPKKYGGFDSPTVAYSVLVVAKVEKGKSKKLKSVKELLGITIMERSSFEKNPIDFLEAKGYKEVKKDLIIKLPKYSLFELENGRKRMLASAGELQKGNELALPSKYVNFLYLASHYEKLKGSPEDNEQKQLFVEQHKHYLDEIIEQISEFSKRVILADANLDKVLSAYNKHRDKPIREQAENIIHLFTLTNLGAPAAFKYFDTTIDRKRYTSTKEVLDATLIHQSITGLYETRIDLSQLGGDAGDMRAANLWPSPLMIKRSKKNSLALSLTADQMVSALLDAEPPILYSEYDPTRPFSEASMMGLLTNLADRELVHMINWAKRVPGFVDLTLHDQVHLLECAWLEILMIGLVWRSMEHPVKLLFAPNLLLDRNQGKCVEGMVEIFDMLLATSSRFRMMNLQGEEFVCLKSIILLNSGVYTFLSSTLKSLEEKDHIHRVLDKITDTLIHLMAKAGLTLQQQHQRLAQLLLILSHIRHMSNKGMEHLYSMKCKNVVPLYDLLLEAADAHRLHAPTSRGGASVEETDQSHLATAGSTSSHSLQKYYITGEAEGFPATA

SEQ ID NO: 287 - protein, 2014 aa, Artificial Sequence
  Cas9 variant 3 linkers
SRADPKKKRKVTGAGDMRAANLWPSPLMIKRSKKNSLALSLTADQMVSALLDAEPPILYSEYDPTRPFSEASMMGLLTNLADRELVHMINWAKRVPGFVDLTLHDQVHLLECAWLEILMIGLVWRSMEHPVKLLFAPNLLLDRNQGKCVEGMVEIFDMLLATSSRFRMMNLQGEEFVCLKSIILLNSGVYTFLSSTLKSLEEKDHIHRVLDKITDTLIHLMAKAGLTLQQQHQRLAQLLLILSHIRHMSNKGMEHLYSMKCKNVVPLYDLLLEAADAHRLHAPTSRGGASVEETDQSHLATAGSTSSHSLQKYYITGEAEGFPATAGGSGGSGADKKYSIGLDIGTNSVGWAVITDEYKVPSKKFKVLGNTDRHSIKKNLIGALLFDSGETAEATRLKRTARRRYTRRKNRICYLQEIFSNEMAKVDDSFFHRLEESFLVEEDKKHERHPIFGNIVDEVAYHEKYPTIYHLRKKLVDSTDKADLRLIYLALAHMIKFRGHFLIEGDLNPDNSDVDKLFIQLVQTYNQLFEENPINASGVDAKAILSARLSKSRRLENLIAQLPGEKKNGLFGNLIALSLGLTPNFKSNFDLAEDAKLQLSKDTYDDDLDNLLAQIGDQYADLFLAAKNLSDAILLSDILRVNTEITKAPLSASMIKRYDEHHQDLTLLKALVRQQLPEKYKEIFFDQSKNGYAGYIDGGASQEEFYKFIKPILEKMDGTEELLVKLNREDLLRKQRTFDNGSIPHQIHLGELHAILRRQEDFYPFLKDNREKIEKILTFRIPYYVGPLARGNSRFAWMTRKSEETITPWNFEEVVDKGASAQSFIERMTNFDKNLPNEKVLPKHSLLYEYFTVYNELTKVKYVTEGMRKPAFLSGEQKKAIVDLLFKTNRKVTVKQLKEDYFKKIECFDSVEISGVEDRFNASLGTYHDLLKIIKDKDFLDNEENEDILEDIVLTLTLFEDREMIEERLKTYAHLFDDKVMKQLKRRRYTGWGRLSRKLINGIRDKQSGKTILDFLKSDGFANRNFMQLIHDDSLTFKEDIQKAQVSGQGDSLHEHIANLAGSPAIKKGILQTVKVVDELVKVMGRHKPENIVIEMARENQTTQKGQKNSRERMKRIEEGIKELGSQILKEHPVENTQLQNEKLYLYYLQNGRDMYVDQELDINRLSDYDVDHIVPQSFLKDDSIDNKVLTRSDKNRGKSDNVPSEEVVKKMKNYWRQLLNAKLITQRKFDNLTKAERGGLSELDKAGFIKRQLVETRQITKHVAQILDSRMNTKYDENDKLIREVKVITLKSKLVSDFRKDFQFYKVREINNYHHAHDAYLNAVVGTALIKKYPKLESEFVYGDYKVYDVRKMIAKSEQEIGKATAKYFFYSNIMNFFKTEITLANGEIRKRPLIETNGETGEIVWDKGRDFATVRKVLSMPQVNIVKKTEVQTGGFSKESILPKRNSDKLIARKKDWDPKKYGGFDSPTVAYSVLVVAKVEKGKSKKLKSVKELLGITIMERSSFEKNPIDFLEAKGYKEVKKDLIIKLPKYSLFELENGRKRMLASAGELQKGNELALPSKYVNFLYLASHYEKLKGSPEDNEQKQLFVEQHKHYLDEIIEQISEFSKRVILADANLDKVLSAYNKHRDKPIREQAENIIHLFTLTNLGAPAAFKYFDTTIDRKRYTSTKEVLDATLIHQSITGLYETRIDLSQLGGDAGDMRAANLWPSPLMIKRSKKNSLALSLTADQMVSALLDAEPPILYSEYDPTRPFSEASMMGLLTNLADRELVHMINWAKRVPGFVDLTLHDQVHLLECAWLEILMIGLVWRSMEHPVKLLFAPNLLLDRNQGKCVEGMVEIFDMLLATSSRFRMMNLQGEEFVCLKSIILLNSGVYTFLSSTLKSLEEKDHIHRVLDKITDTLIHLMAKAGLTLQQQHQRLAQLLLILSHIRHMSNKGMEHLYSMKCKNVVPLYDLLLEAADAHRLHAPTSRGGASVEETDQSHLATAGSTSSHSLQKYYITGEAEGFPATA

SEQ ID NO: 288 - protein, 2014 aa, Artificial Sequence
  Cas9 variant 11 linkers
SRADPKKKRKVTGPGPGGSAGDMRAANLWPSPLMIKRSKKNSLALSLTADQMVSALLDAEPPILYSEYDPTRPFSEASMMGLLTNLADRELVHMINWAKRVPGFVDLTLHDQVHLLECAWLEILMIGLVWRSMEHPVKLLFAPNLLLDRNQGKCVEGMVEIFDMLLATSSRFRMMNLQGEEFVCLKSIILLNSGVYTFLSSTLKSLEEKDHIHRVLDKITDTLIHLMAKAGLTLQQQHQRLAQLLLILSHIRHMSNKGMEHLYSMKCKNVVPLYDLLLEAADAHRLHAPTSRGGASVEETDQSHLATAGSTSSHSLQKYYITGEAEGFPATAGADKKYSIGLDIGTNSVGWAVITDEYKVPSKKFKVLGNTDRHSIKKNLIGALLFDSGETAEATRLKRTARRRYTRRKNRICYLQEIFSNEMAKVDDSFFHRLEESFLVEEDKKHERHPIFGNIVDEVAYHEKYPTIYHLRKKLVDSTDKADLRLIYLALAHMIKFRGHFLIEGDLNPDNSDVDKLFIQLVQTYNQLFEENPINASGVDAKAILSARLSKSRRLENLIAQLPGEKKNGLFGNLIALSLGLTPNFKSNFDLAEDAKLQLSKDTYDDDLDNLLAQIGDQYADLFLAAKNLSDAILLSDILRVNTEITKAPLSASMIKRYDEHHQDLTLLKALVRQQLPEKYKEIFFDQSKNGYAGYIDGGASQEEFYKFIKPILEKMDGTEELLVKLNREDLLRKQRTFDNGSIPHQIHLGELHAILRRQEDFYPFLKDNREKIEKILTFRIPYYVGPLARGNSRFAWMTRKSEETITPWNFEEVVDKGASAQSFIERMTNFDKNLPNEKVLPKHSLLYEYFTVYNELTKVKYVTEGMRKPAFLSGEQKKAIVDLLFKTNRKVTVKQLKEDYFKKIECFDSVEISGVEDRFNASLGTYHDLLKIIKDKDFLDNEENEDILEDIVLTLTLFEDREMIEERLKTYAHLFDDKVMKQLKRRRYTGWGRLSRKLINGIRDKQSGKTILDFLKSDGFANRNFMQLIHDDSLTFKEDIQKAQVSGQGDSLHEHIANLAGSPAIKKGILQTVKVVDELVKVMGRHKPENIVIEMARENQTTQKGQKNSRERMKRIEEGIKELGSQILKEHPVENTQLQNEKLYLYYLQNGRDMYVDQELDINRLSDYDVDHIVPQSFLKDDSIDNKVLTRSDKNRGKSDNVPSEEVVKKMKNYWRQLLNAKLITQRKFDNLTKAERGGLSELDKAGFIKRQLVETRQITKHVAQILDSRMNTKYDENDKLIREVKVITLKSKLVSDFRKDFQFYKVREINNYHHAHDAYLNAVVGTALIKKYPKLESEFVYGDYKVYDVRKMIAKSEQEIGKATAKYFFYSNIMNFFKTEITLANGEIRKRPLIETNGETGEIVWDKGRDFATVRKVLSMPQVNIVKKTEVQTGGFSKESILPKRNSDKLIARKKDWDPKKYGGFDSPTVAYSVLVVAKVEKGKSKKLKSVKELLGITIMERSSFEKNPIDFLEAKGYKEVKKDLIIKLPKYSLFELENGRKRMLASAGELQKGNELALPSKYVNFLYLASHYEKLKGSPEDNEQKQLFVEQHKHYLDEIIEQISEFSKRVILADANLDKVLSAYNKHRDKPIREQAENIIHLFTLTNLGAPAAFKYFDTTIDRKRYTSTKEVLDATLIHQSITGLYETRIDLSQLGGDAGDMRAANLWPSPLMIKRSKKNSLALSLTADQMVSALLDAEPPILYSEYDPTRPFSEASMMGLLTNLADRELVHMINWAKRVPGFVDLTLHDQVHLLECAWLEILMIGLVWRSMEHPVKLLFAPNLLLDRNQGKCVEGMVEIFDMLLATSSRFRMMNLQGEEFVCLKSIILLNSGVYTFLSSTLKSLEEKDHIHRVLDKITDTLIHLMAKAGLTLQQQHQRLAQLLLILSHIRHMSNKGMEHLYSMKCKNVVPLYDLLLEAADAHRLHAPTSRGGASVEETDQSHLATAGSTSSHSLQKYYITGEAEGFPATA

SEQ ID NO: 289 - protein, 2026 aa, Artificial Sequence
  Cas9 variant 14 linkers
SRADPKKKRKVTGPGPGGSAGDTTGPGTGPGAGDMRAANLWPSPLMIKRSKKNSLALSLTADQMVSALLDAEPPILYSEYDPTRPFSEASMMGLLTNLADRELVHMINWAKRVPGFVDLTLHDQVHLLECAWLEILMIGLVWRSMEHPVKLLFAPNLLLDRNQGKCVEGMVEIFDMLLATSSRFRMMNLQGEEFVCLKSIILLNSGVYTFLSSTLKSLEEKDHIHRVLDKITDTLIHLMAKAGLTLQQQHQRLAQLLLILSHIRHMSNKGMEHLYSMKCKNVVPLYDLLLEAADAHRLHAPTSRGGASVEETDQSHLATAGSTSSHSLQKYYITGEAEGFPATAGADKKYSIGLDIGTNSVGWAVITDEYKVPSKKFKVLGNTDRHSIKKNLIGALLFDSGETAEATRLKRTARRRYTRRKNRICYLQEIFSNEMAKVDDSFFHRLEESFLVEEDKKHERHPIFGNIVDEVAYHEKYPTIYHLRKKLVDSTDKADLRLIYLALAHMIKFRGHFLIEGDLNPDNSDVDKLFIQLVQTYNQLFEENPINASGVDAKAILSARLSKSRRLENLIAQLPGEKKNGLFGNLIALSLGLTPNFKSNFDLAEDAKLQLSKDTYDDDLDNLLAQIGDQYADLFLAAKNLSDAILLSDILRVNTEITKAPLSASMIKRYDEHHQDLTLLKALVRQQLPEKYKEIFFDQSKNGYAGYIDGGASQEEFYKFIKPILEKMDGTEELLVKLNREDLLRKQRTFDNGSIPHQIHLGELHAILRRQEDFYPFLKDNREKIEKILTFRIPYYVGPLARGNSRFAWMTRKSEETITPWNFEEVVDKGASAQSFIERMTNFDKNLPNEKVLPKHSLLYEYFTVYNELTKVKYVTEGMRKPAFLSGEQKKAIVDLLFKTNRKVTVKQLKEDYFKKIECFDSVEISGVEDRFNASLGTYHDLLKIIKDKDFLDNEENEDILEDIVLTLTLFEDREMIEERLKTYAHLFDDKVMKQLKRRRYTGWGRLSRKLINGIRDKQSGKTILDFLKSDGFANRNFMQLIHDDSLTFKEDIQKAQVSGQGDSLHEHIANLAGSPAIKKGILQTVKVVDELVKVMGRHKPENIVIEMARENQTTQKGQKNSRERMKRIEEGIKELGSQILKEHPVENTQLQNEKLYLYYLQNGRDMYVDQELDINRLSDYDVDHIVPQSFLKDDSIDNKVLTRSDKNRGKSDNVPSEEVVKKMKNYWRQLLNAKLITQRKFDNLTKAERGGLSELDKAGFIKRQLVETRQITKHVAQILDSRMNTKYDENDKLIREVKVITLKSKLVSDFRKDFQFYKVREINNYHHAHDAYLNAVVGTALIKKYPKLESEFVYGDYKVYDVRKMIAKSEQEIGKATAKYFFYSNIMNFFKTEITLANGEIRKRPLIETNGETGEIVWDKGRDFATVRKVLSMPQVNIVKKTEVQTGGFSKESILPKRNSDKLIARKKDWDPKKYGGFDSPTVAYSVLVVAKVEKGKSKKLKSVKELLGITIMERSSFEKNPIDFLEAKGYKEVKKDLIIKLPKYSLFELENGRKRMLASAGELQKGNELALPSKYVNFLYLASHYEKLKGSPEDNEQKQLFVEQHKHYLDEIIEQISEFSKRVILADANLDKVLSAYNKHRDKPIREQAENIIHLFTLTNLGAPAAFKYFDTTIDRKRYTSTKEVLDATLIHQSITGLYETRIDLSQLGGDAGDMRAANLWPSPLMIKRSKKNSLALSLTADQMVSALLDAEPPILYSEYDPTRPFSEASMMGLLTNLADRELVHMINWAKRVPGFVDLTLHDQVHLLECAWLEILMIGLVWRSMEHPVKLLFAPNLLLDRNQGKCVEGMVEIFDMLLATSSRFRMMNLQGEEFVCLKSIILLNSGVYTFLSSTLKSLEEKDHIHRVLDKITDTLIHLMAKAGLTLQQQHQRLAQLLLILSHIRHMSNKGMEHLYSMKCKNVVPLYDLLLEAADAHRLHAPTSRGGASVEETDQSHLATAGSTSSHSLQKYYITGEAEGFPATA

SEQ ID NO: 290 - protein, 2012 aa, Artificial Sequence
  Cas9 variant 19 linkers
SRADPKKKRKVTGAGDMRAANLWPSPLMIKRSKKNSLALSLTADQMVSALLDAEPPILYSEYDPTRPFSEASMMGLLTNLADRELVHMINWAKRVPGFVDLTLHDQVHLLECAWLEILMIGLVWRSMEHPVKLLFAPNLLLDRNQGKCVEGMVEIFDMLLATSSRFRMMNLQGEEFVCLKSIILLNSGVYTFLSSTLKSLEEKDHIHRVLDKITDTLIHLMAKAGLTLQQQHQRLAQLLLILSHIRHMSNKGMEHLYSMKCKNVVPLYDLLLEAADAHRLHAPTSRGGASVEETDQSHLATAGSTSSHSLQKYYITGEAEGFPATAGADKKYSIGLDIGTNSVGWAVITDEYKVPSKKFKVLGNTDRHSIKKNLIGALLFDSGETAEATRLKRTARRRYTRRKNRICYLQEIFSNEMAKVDDSFFHRLEESFLVEEDKKHERHPIFGNIVDEVAYHEKYPTIYHLRKKLVDSTDKADLRLIYLALAHMIKFRGHFLIEGDLNPDNSDVDKLFIQLVQTYNQLFEENPINASGVDAKAILSARLSKSRRLENLIAQLPGEKKNGLFGNLIALSLGLTPNFKSNFDLAEDAKLQLSKDTYDDDLDNLLAQIGDQYADLFLAAKNLSDAILLSDILRVNTEITKAPLSASMIKRYDEHHQDLTLLKALVRQQLPEKYKEIFFDQSKNGYAGYIDGGASQEEFYKFIKPILEKMDGTEELLVKLNREDLLRKQRTFDNGSIPHQIHLGELHAILRRQEDFYPFLKDNREKIEKILTFRIPYYVGPLARGNSRFAWMTRKSEETITPWNFEEVVDKGASAQSFIERMTNFDKNLPNEKVLPKHSLLYEYFTVYNELTKVKYVTEGMRKPAFLSGEQKKAIVDLLFKTNRKVTVKQLKEDYFKKIECFDSVEISGVEDRFNASLGTYHDLLKIIKDKDFLDNEENEDILEDIVLTLTLFEDREMIEERLKTYAHLFDDKVMKQLKRRRYTGWGRLSRKLINGIRDKQSGKTILDFLKSDGFANRNFMQLIHDDSLTFKEDIQKAQVSGQGDSLHEHIANLAGSPAIKKGILQTVKVVDELVKVMGRHKPENIVIEMARENQTTQKGQKNSRERMKRIEEGIKELGSQILKEHPVENTQLQNEKLYLYYLQNGRDMYVDQELDINRLSDYDVDHIVPQSFLKDDSIDNKVLTRSDKNRGKSDNVPSEEVVKKMKNYWRQLLNAKLITQRKFDNLTKAERGGLSELDKAGFIKRQLVETRQITKHVAQILDSRMNTKYDENDKLIREVKVITLKSKLVSDFRKDFQFYKVREINNYHHAHDAYLNAVVGTALIKKYPKLESEFVYGDYKVYDVRKMIAKSEQEIGKATAKYFFYSNIMNFFKTEITLANGEIRKRPLIETNGETGEIVWDKGRDFATVRKVLSMPQVNIVKKTEVQTGGFSKESILPKRNSDKLIARKKDWDPKKYGGFDSPTVAYSVLVVAKVEKGKSKKLKSVKELLGITIMERSSFEKNPIDFLEAKGYKEVKKDLIIKLPKYSLFELENGRKRMLASAGELQKGNELALPSKYVNFLYLASHYEKLKGSPEDNEQKQLFVEQHKHYLDEIIEQISEFSKRVILADANLDKVLSAYNKHRDKPIREQAENIIHLFTLTNLGAPAAFKYFDTTIDRKRYTSTKEVLDATLIHQSITGLYETRIDLSQLGGDGGGSAGDMRAANLWPSPLMIKRSKKNSLALSLTADQMVSALLDAEPPILYSEYDPTRPFSEASMMGLLTNLADRELVHMINWAKRVPGFVDLTLHDQVHLLECAWLEILMIGLVWRSMEHPVKLLFAPNLLLDRNQGKCVEGMVEIFDMLLATSSRFRMMNLQGEEFVCLKSIILLNSGVYTFLSSTLKSLEEKDHIHRVLDKITDTLIHLMAKAGLTLQQQHQRLAQLLLILSHIRHMSNKGMEHLYSMKCKNVVPLYDLLLEAADAHRLHAPTSRGGASVEETDQSHLATAGSTSSHSLQKYYITGEAEGFPATA

SEQ ID NO: 291 - protein, 2015 aa, Artificial Sequence
  Cas9 variant 13 linkers
SRADPKKKRKVTGGGSAGDMRAANLWPSPLMIKRSKKNSLALSLTADQMVSALLDAEPPILYSEYDPTRPFSEASMMGLLTNLADRELVHMINWAKRVPGFVDLTLHDQVHLLECAWLEILMIGLVWRSMEHPVKLLFAPNLLLDRNQGKCVEGMVEIFDMLLATSSRFRMMNLQGEEFVCLKSIILLNSGVYTFLSSTLKSLEEKDHIHRVLDKITDTLIHLMAKAGLTLQQQHQRLAQLLLILSHIRHMSNKGMEHLYSMKCKNVVPLYDLLLEAADAHRLHAPTSRGGASVEETDQSHLATAGSTSSHSLQKYYITGEAEGFPATATPESGADKKYSIGLDIGTNSVGWAVITDEYKVPSKKFKVLGNTDRHSIKKNLIGALLFDSGETAEATRLKRTARRRYTRRKNRICYLQEIFSNEMAKVDDSFFHRLEESFLVEEDKKHERHPIFGNIVDEVAYHEKYPTIYHLRKKLVDSTDKADLRLIYLALAHMIKFRGHFLIEGDLNPDNSDVDKLFIQLVQTYNQLFEENPINASGVDAKAILSARLSKSRRLENLIAQLPGEKKNGLFGNLIALSLGLTPNFKSNFDLAEDAKLQLSKDTYDDDLDNLLAQIGDQYADLFLAAKNLSDAILLSDILRVNTEITKAPLSASMIKRYDEHHQDLTLLKALVRQQLPEKYKEIFFDQSKNGYAGYIDGGASQEEFYKFIKPILEKMDGTEELLVKLNREDLLRKQRTFDNGSIPHQIHLGELHAILRRQEDFYPFLKDNREKIEKILTFRIPYYVGPLARGNSRFAWMTRKSEETITPWNFEEVVDKGASAQSFIERMTNFDKNLPNEKVLPKHSLLYEYFTVYNELTKVKYVTEGMRKPAFLSGEQKKAIVDLLFKTNRKVTVKQLKEDYFKKIECFDSVEISGVEDRFNASLGTYHDLLKIIKDKDFLDNEENEDILEDIVLTLTLFEDREMIEERLKTYAHLFDDKVMKQLKRRRYTGWGRLSRKLINGIRDKQSGKTILDFLKSDGFANRNFMQLIHDDSLTFKEDIQKAQVSGQGDSLHEHIANLAGSPAIKKGILQTVKVVDELVKVMGRHKPENIVIEMARENQTTQKGQKNSRERMKRIEEGIKELGSQILKEHPVENTQLQNEKLYLYYLQNGRDMYVDQELDINRLSDYDVDHIVPQSFLKDDSIDNKVLTRSDKNRGKSDNVPSEEVVKKMKNYWRQLLNAKLITQRKFDNLTKAERGGLSELDKAGFIKRQLVETRQITKHVAQILDSRMNTKYDENDKLIREVKVITLKSKLVSDFRKDFQFYKVREINNYHHAHDAYLNAVVGTALIKKYPKLESEFVYGDYKVYDVRKMIAKSEQEIGKATAKYFFYSNIMNFFKTEITLANGEIRKRPLIETNGETGEIVWDKGRDFATVRKVLSMPQVNIVKKTEVQTGGFSKESILPKRNSDKLIARKKDWDPKKYGGFDSPTVAYSVLVVAKVEKGKSKKLKSVKELLGITIMERSSFEKNPIDFLEAKGYKEVKKDLIIKLPKYSLFELENGRKRMLASAGELQKGNELALPSKYVNFLYLASHYEKLKGSPEDNEQKQLFVEQHKHYLDEIIEQISEFSKRVILADANLDKVLSAYNKHRDKPIREQAENIIHLFTLTNLGAPAAFKYFDTTIDRKRYTSTKEVLDATLIHQSITGLYETRIDLSQLGGDAGDMRAANLWPSPLMIKRSKKNSLALSLTADQMVSALLDAEPPILYSEYDPTRPFSEASMMGLLTNLADRELVHMINWAKRVPGFVDLTLHDQVHLLECAWLEILMIGLVWRSMEHPVKLLFAPNLLLDRNQGKCVEGMVEIFDMLLATSSRFRMMNLQGEEFVCLKSIILLNSGVYTFLSSTLKSLEEKDHIHRVLDKITDTLIHLMAKAGLTLQQQHQRLAQLLLILSHIRHMSNKGMEHLYSMKCKNVVPLYDLLLEAADAHRLHAPTSRGGASVEETDQSHLATAGSTSSHSLQKYYITGEAEGFPATA

SEQ ID NO: 292 - protein, 2019 aa, Artificial Sequence
  Cas9 variant 15 linkers
SRADPKKKRKVTGGGSAGDMRAANLWPSPLMIKRSKKNSLALSLTADQMVSALLDAEPPILYSEYDPTRPFSEASMMGLLTNLADRELVHMINWAKRVPGFVDLTLHDQVHLLECAWLEILMIGLVWRSMEHPVKLLFAPNLLLDRNQGKCVEGMVEIFDMLLATSSRFRMMNLQGEEFVCLKSIILLNSGVYTFLSSTLKSLEEKDHIHRVLDKITDTLIHLMAKAGLTLQQQHQRLAQLLLILSHIRHMSNKGMEHLYSMKCKNVVPLYDLLLEAADAHRLHAPTSRGGASVEETDQSHLATAGSTSSHSLQKYYITGEAEGFPATASESATPESGADKKYSIGLDIGTNSVGWAVITDEYKVPSKKFKVLGNTDRHSIKKNLIGALLFDSGETAEATRLKRTARRRYTRRKNRICYLQEIFSNEMAKVDDSFFHRLEESFLVEEDKKHERHPIFGNIVDEVAYHEKYPTIYHLRKKLVDSTDKADLRLIYLALAHMIKFRGHFLIEGDLNPDNSDVDKLFIQLVQTYNQLFEENPINASGVDAKAILSARLSKSRRLENLIAQLPGEKKNGLFGNLIALSLGLTPNFKSNFDLAEDAKLQLSKDTYDDDLDNLLAQIGDQYADLFLAAKNLSDAILLSDILRVNTEITKAPLSASMIKRYDEHHQDLTLLKALVRQQLPEKYKEIFFDQSKNGYAGYIDGGASQEEFYKFIKPILEKMDGTEELLVKLNREDLLRKQRTFDNGSIPHQIHLGELHAILRRQEDFYPFLKDNREKIEKILTFRIPYYVGPLARGNSRFAWMTRKSEETITPWNFEEVVDKGASAQSFIERMTNFDKNLPNEKVLPKHSLLYEYFTVYNELTKVKYVTEGMRKPAFLSGEQKKAIVDLLFKTNRKVTVKQLKEDYFKKIECFDSVEISGVEDRFNASLGTYHDLLKIIKDKDFLDNEENEDILEDIVLTLTLFEDREMIEERLKTYAHLFDDKVMKQLKRRRYTGWGRLSRKLINGIRDKQSGKTILDFLKSDGFANRNFMQLIHDDSLTFKEDIQKAQVSGQGDSLHEHIANLAGSPAIKKGILQTVKVVDELVKVMGRHKPENIVIEMARENQTTQKGQKNSRERMKRIEEGIKELGSQILKEHPVENTQLQNEKLYLYYLQNGRDMYVDQELDINRLSDYDVDHIVPQSFLKDDSIDNKVLTRSDKNRGKSDNVPSEEVVKKMKNYWRQLLNAKLITQRKFDNLTKAERGGLSELDKAGFIKRQLVETRQITKHVAQILDSRMNTKYDENDKLIREVKVITLKSKLVSDFRKDFQFYKVREINNYHHAHDAYLNAVVGTALIKKYPKLESEFVYGDYKVYDVRKMIAKSEQEIGKATAKYFFYSNIMNFFKTEITLANGEIRKRPLIETNGETGEIVWDKGRDFATVRKVLSMPQVNIVKKTEVQTGGFSKESILPKRNSDKLIARKKDWDPKKYGGFDSPTVAYSVLVVAKVEKGKSKKLKSVKELLGITIMERSSFEKNPIDFLEAKGYKEVKKDLIIKLPKYSLFELENGRKRMLASAGELQKGNELALPSKYVNFLYLASHYEKLKGSPEDNEQKQLFVEQHKHYLDEIIEQISEFSKRVILADANLDKVLSAYNKHRDKPIREQAENIIHLFTLTNLGAPAAFKYFDTTIDRKRYTSTKEVLDATLIHQSITGLYETRIDLSQLGGDAGDMRAANLWPSPLMIKRSKKNSLALSLTADQMVSALLDAEPPILYSEYDPTRPFSEASMMGLLTNLADRELVHMINWAKRVPGFVDLTLHDQVHLLECAWLEILMIGLVWRSMEHPVKLLFAPNLLLDRNQGKCVEGMVEIFDMLLATSSRFRMMNLQGEEFVCLKSIILLNSGVYTFLSSTLKSLEEKDHIHRVLDKITDTLIHLMAKAGLTLQQQHQRLAQLLLILSHIRHMSNKGMEHLYSMKCKNVVPLYDLLLEAADAHRLHAPTSRGGASVEETDQSHLATAGSTSSHSLQKYYITGEAEGFPATA

SEQ ID NO: 293 - protein, 2016 aa, Artificial Sequence
  Cas9 variant 16 linkers
  misc_feature (1)..(1): Xaa can be any naturally occurring amino acid
XSRADPKKKRKVTGGGSAGDMRAANLWPSPLMIKRSKKNSLALSLTADQMVSALLDAEPPILYSEYDPTRPFSEASMMGLLTNLADRELVHMINWAKRVPGFVDLTLHDQVHLLECAWLEILMIGLVWRSMEHPVKLLFAPNLLLDRNQGKCVEGMVEIFDMLLATSSRFRMMNLQGEEFVCLKSIILLNSGVYTFLSSTLKSLEEKDHIHRVLDKITDTLIHLMAKAGLTLQQQHQRLAQLLLILSHIRHMSNKGMEHLYSMKCKNVVPLYDLLLEAADAHRLHAPTSRGGASVEETDQSHLATAGSTSSHSLQKYYITGEAEGFPATASGSEGADKKYSIGLDIGTNSVGWAVITDEYKVPSKKFKVLGNTDRHSIKKNLIGALLFDSGETAEATRLKRTARRRYTRRKNRICYLQEIFSNEMAKVDDSFFHRLEESFLVEEDKKHERHPIFGNIVDEVAYHEKYPTIYHLRKKLVDSTDKADLRLIYLALAHMIKFRGHFLIEGDLNPDNSDVDKLFIQLVQTYNQLFEENPINASGVDAKAILSARLSKSRRLENLIAQLPGEKKNGLFGNLIALSLGLTPNFKSNFDLAEDAKLQLSKDTYDDDLDNLLAQIGDQYADLFLAAKNLSDAILLSDILRVNTEITKAPLSASMIKRYDEHHQDLTLLKALVRQQLPEKYKEIFFDQSKNGYAGYIDGGASQEEFYKFIKPILEKMDGTEELLVKLNREDLLRKQRTFDNGSIPHQIHLGELHAILRRQEDFYPFLKDNREKIEKILTFRIPYYVGPLARGNSRFAWMTRKSEETITPWNFEEVVDKGASAQSFIERMTNFDKNLPNEKVLPKHSLLYEYFTVYNELTKVKYVTEGMRKPAFLSGEQKKAIVDLLFKTNRKVTVKQLKEDYFKKIECFDSVEISGVEDRFNASLGTYHDLLKIIKDKDFLDNEENEDILEDIVLTLTLFEDREMIEERLKTYAHLFDDKVMKQLKRRRYTGWGRLSRKLINGIRDKQSGKTILDFLKSDGFANRNFMQLIHDDSLTFKEDIQKAQVSGQGDSLHEHIANLAGSPAIKKGILQTVKVVDELVKVMGRHKPENIVIEMARENQTTQKGQKNSRERMKRIEEGIKELGSQILKEHPVENTQLQNEKLYLYYLQNGRDMYVDQELDINRLSDYDVDHIVPQSFLKDDSIDNKVLTRSDKNRGKSDNVPSEEVVKKMKNYWRQLLNAKLITQRKFDNLTKAERGGLSELDKAGFIKRQLVETRQITKHVAQILDSRMNTKYDENDKLIREVKVITLKSKLVSDFRKDFQFYKVREINNYHHAHDAYLNAVVGTALIKKYPKLESEFVYGDYKVYDVRKMIAKSEQEIGKATAKYFFYSNIMNFFKTEITLANGEIRKRPLIETNGETGEIVWDKGRDFATVRKVLSMPQVNIVKKTEVQTGGFSKESILPKRNSDKLIARKKDWDPKKYGGFDSPTVAYSVLVVAKVEKGKSKKLKSVKELLGITIMERSSFEKNPIDFLEAKGYKEVKKDLIIKLPKYSLFELENGRKRMLASAGELQKGNELALPSKYVNFLYLASHYEKLKGSPEDNEQKQLFVEQHKHYLDEIIEQISEFSKRVILADANLDKVLSAYNKHRDKPIREQAENIIHLFTLTNLGAPAAFKYFDTTIDRKRYTSTKEVLDATLIHQSITGLYETRIDLSQLGGDAGDMRAANLWPSPLMIKRSKKNSLALSLTADQMVSALLDAEPPILYSEYDPTRPFSEASMMGLLTNLADRELVHMINWAKRVPGFVDLTLHDQVHLLECAWLEILMIGLVWRSMEHPVKLLFAPNLLLDRNQGKCVEGMVEIFDMLLATSSRFRMMNLQGEEFVCLKSIILLNSGVYTFLSSTLKSLEEKDHIHRVLDKITDTLIHLMAKAGLTLQQQHQRLAQLLLILSHIRHMSNKGMEHLYSMKCKNVVPLYDLLLEAADAHRLHAPTSRGGASVEETDQSHLATAGSTSSHSLQKYYITGEAEGFPATA

SEQ ID NO: 294 - protein, 2019 aa, Artificial Sequence
  Cas9 variant 7 linkers
SRADPKKKRKVTGGGSAGDMRAANLWPSPLMIKRSKKNSLALSLTADQMVSALLDAEPPILYSEYDPTRPFSEASMMGLLTNLADRELVHMINWAKRVPGFVDLTLHDQVHLLECAWLEILMIGLVWRSMEHPVKLLFAPNLLLDRNQGKCVEGMVEIFDMLLATSSRFRMMNLQGEEFVCLKSIILLNSGVYTFLSSTLKSLEEKDHIHRVLDKITDTLIHLMAKAGLTLQQQHQRLAQLLLILSHIRHMSNKGMEHLYSMKCKNVVPLYDLLLEAADAHRLHAPTSRGGASVEETDQSHLATAGSTSSHSLQKYYITGEAEGFPATASGSETPGTGADKKYSIGLDIGTNSVGWAVITDEYKVPSKKFKVLGNTDRHSIKKNLIGALLFDSGETAEATRLKRTARRRYTRRKNRICYLQEIFSNEMAKVDDSFFHRLEESFLVEEDKKHERHPIFGNIVDEVAYHEKYPTIYHLRKKLVDSTDKADLRLIYLALAHMIKFRGHFLIEGDLNPDNSDVDKLFIQLVQTYNQLFEENPINASGVDAKAILSARLSKSRRLENLIAQLPGEKKNGLFGNLIALSLGLTPNFKSNFDLAEDAKLQLSKDTYDDDLDNLLAQIGDQYADLFLAAKNLSDAILLSDILRVNTEITKAPLSASMIKRYDEHHQDLTLLKALVRQQLPEKYKEIFFDQSKNGYAGYIDGGASQEEFYKFIKPILEKMDGTEELLVKLNREDLLRKQRTFDNGSIPHQIHLGELHAILRRQEDFYPFLKDNREKIEKILTFRIPYYVGPLARGNSRFAWMTRKSEETITPWNFEEVVDKGASAQSFIERMTNFDKNLPNEKVLPKHSLLYEYFTVYNELTKVKYVTEGMRKPAFLSGEQKKAIVDLLFKTNRKVTVKQLKEDYFKKIECFDSVEISGVEDRFNASLGTYHDLLKIIKDKDFLDNEENEDILEDIVLTLTLFEDREMIEERLKTYAHLFDDKVMKQLKRRRYTGWGRLSRKLINGIRDKQSGKTILDFLKSDGFANRNFMQLIHDDSLTFKEDIQKAQVSGQGDSLHEHIANLAGSPAIKKGILQTVKVVDELVKVMGRHKPENIVIEMARENQTTQKGQKNSRERMKRIEEGIKELGSQILKEHPVENTQLQNEKLYLYYLQNGRDMYVDQELDINRLSDYDVDHIVPQSFLKDDSIDNKVLTRSDKNRGKSDNVPSEEVVKKMKNYWRQLLNAKLITQRKFDNLTKAERGGLSELDKAGFIKRQLVETRQITKHVAQILDSRMNTKYDENDKLIREVKVITLKSKLVSDFRKDFQFYKVREINNYHHAHDAYLNAVVGTALIKKYPKLESEFVYGDYKVYDVRKMIAKSEQEIGKATAKYFFYSNIMNFFKTEITLANGEIRKRPLIETNGETGEIVWDKGRDFATVRKVLSMPQVNIVKKTEVQTGGFSKESILPKRNSDKLIARKKDWDPKKYGGFDSPTVAYSVLVVAKVEKGKSKKLKSVKELLGITIMERSSFEKNPIDFLEAKGYKEVKKDLIIKLPKYSLFELENGRKRMLASAGELQKGNELALPSKYVNFLYLASHYEKLKGSPEDNEQKQLFVEQHKHYLDEIIEQISEFSKRVILADANLDKVLSAYNKHRDKPIREQAENIIHLFTLTNLGAPAAFKYFDTTIDRKRYTSTKEVLDATLIHQSITGLYETRIDLSQLGGDAGDMRAANLWPSPLMIKRSKKNSLALSLTADQMVSALLDAEPPILYSEYDPTRPFSEASMMGLLTNLADRELVHMINWAKRVPGFVDLTLHDQVHLLECAWLEILMIGLVWRSMEHPVKLLFAPNLLLDRNQGKCVEGMVEIFDMLLATSSRFRMMNLQGEEFVCLKSIILLNSGVYTFLSSTLKSLEEKDHIHRVLDKITDTLIHLMAKAGLTLQQQHQRLAQLLLILSHIRHMSNKGMEHLYSMKCKNVVPLYDLLLEAADAHRLHAPTSRGGASVEETDQSHLATAGSTSSHSLQKYYITGEAEGFPATA

SEQ ID NO: 295 - protein, 2036 aa, Artificial Sequence
  #Cas9 variant 1
SRADPKKKRKVTGAGDMRAANLWPSPLMIKRSKKNSLALSLTADQMVSALLDAEPPILYSEYDPTRPFSEASMMGLLTNLADRELVHMINWAKRVPGFVDLTLHDQVHLLECAWLEILMIGLVWRSMEHPVKLLFAPNLLLDRNQGKCVEGMVEIFDMLLATSSRFRMMNLQGEEFVCLKSIILLNSGVYTFLSSTLKSLEEKDHIHRVLDKITDTLIHLMAKAGLTLQQQHQRLAQLLLILSHIRHMSNKGMEHLYSMKCKNVVPLYDLLLEAADAHRLHAPTSRGGASVEETDQSHLATAGSTSSHSLQKYYITGEAEGFPATASGSETPGTSESAGADKKYSIGLDIGTNSVGWAVITDEYKVPSKKFKVLGNTDRHSIKKNLIGALLFDSGETAEATRLKRTARRRYTRRKNRICYLQEIFSNEMAKVDDSFFHRLEESFLVEEDKKHERHPIFGNIVDEVAYHEKYPTIYHLRKKLVDSTDKADLRLIYLALAHMIKFRGHFLIEGDLNPDNSDVDKLFIQLVQTYNQLFEENPINASGVDAKAILSARLSKSRRLENLIAQLPGEKKNGLFGNLIALSLGLTPNFKSNFDLAEDAKLQLSKDTYDDDLDNLLAQIGDQYADLFLAAKNLSDAILLSDILRVNTEITKAPLSASMIKRYDEHHQDLTLLKALVRQQLPEKYKEIFFDQSKNGYAGYIDGGASQEEFYKFIKPILEKMDGTEELLVKLNREDLLRKQRTFDNGSIPHQIHLGELHAILRRQEDFYPFLKDNREKIEKILTFRIPYYVGPLARGNSRFAWMTRKSEETITPWNFEEVVDKGASAQSFIERMTNFDKNLPNEKVLPKHSLLYEYFTVYNELTKVKYVTEGMRKPAFLSGEQKKAIVDLLFKTNRKVTVKQLKEDYFKKIECFDSVEISGVEDRFNASLGTYHDLLKIIKDKDFLDNEENEDILEDIVLTLTLFEDREMIEERLKTYAHLFDDKVMKQLKRRRYTGWGRLSRKLINGIRDKQSGKTILDFLKSDGFANRNFMQLIHDDSLTFKEDIQKAQVSGQGDSLHEHIANLAGSPAIKKGILQTVKVVDELVKVMGRHKPENIVIEMARENQTTQKGQKNSRERMKRIEEGIKELGSQILKEHPVENTQLQNEKLYLYYLQNGRDMYVDQELDINRLSDYDVDHIVPQSFLKDDSIDNKVLTRSDKNRGKSDNVPSEEVVKKMKNYWRQLLNAKLITQRKFDNLTKAERGGLSELDKAGFIKRQLVETRQITKHVAQILDSRMNTKYDENDKLIREVKVITLKSKLVSDFRKDFQFYKVREINNYHHAHDAYLNAVVGTALIKKYPKLESEFVYGDYKVYDVRKMIAKSEQEIGKATAKYFFYSNIMNFFKTEITLANGEIRKRPLIETNGETGEIVWDKGRDFATVRKVLSMPQVNIVKKTEVQTGGFSKESILPKRNSDKLIARKKDWDPKKYGGFDSPTVAYSVLVVAKVEKGKSKKLKSVKELLGITIMERSSFEKNPIDFLEAKGYKEVKKDLIIKLPKYSLFELENGRKRMLASAGELQKGNELALPSKYVNFLYLASHYEKLKGSPEDNEQKQLFVEQHKHYLDEIIEQISEFSKRVILADANLDKVLSAYNKHRDKPIREQAENIIHLFTLTNLGAPAAFKYFDTTIDRKRYTSTKEVLDATLIHQSITGLYETRIDLSQLGGDAPKKKRKVGIHGVPAAAGDMRAANLWPSPLMIKRSKKNSLALSLTADQMVSALLDAEPPILYSEYDPTRPFSEASMMGLLTNLADRELVHMINWAKRVPGFVDLTLHDQVHLLECAWLEILMIGLVWRSMEHPVKLLFAPNLLLDRNQGKCVEGMVEIFDMLLATSSRFRMMNLQGEEFVCLKSIILLNSGVYTFLSSTLKSLEEKDHIHRVLDKITDTLIHLMAKAGLTLQQQHQRLAQLLLILSHIRHMSNKGMEHLYSMKCKNVVPLYDLLLEAADAHRLHAPTSRGGASVEETDQSHLATAGSTSSHSLQKYYITGEAEGFPATA

SEQ ID NO: 296 - protein, 2028 aa, Artificial Sequence
  #Cas9 variant 2
SRADPKKKRKVTGAGDMRAANLWPSPLMIKRSKKNSLALSLTADQMVSALLDAEPPILYSEYDPTRPFSEASMMGLLTNLADRELVHMINWAKRVPGFVDLTLHDQVHLLECAWLEILMIGLVWRSMEHPVKLLFAPNLLLDRNQGKCVEGMVEIFDMLLATSSRFRMMNLQGEEFVCLKSIILLNSGVYTFLSSTLKSLEEKDHIHRVLDKITDTLIHLMAKAGLTLQQQHQRLAQLLLILSHIRHMSNKGMEHLYSMKCKNVVPLYDLLLEAADAHRLHAPTSRGGASVEETDQSHLATAGSTSSHSLQKYYITGEAEGFPATASGSEGADKKYSIGLDIGTNSVGWAVITDEYKVPSKKFKVLGNTDRHSIKKNLIGALLFDSGETAEATRLKRTARRRYTRRKNRICYLQEIFSNEMAKVDDSFFHRLEESFLVEEDKKHERHPIFGNIVDEVAYHEKYPTIYHLRKKLVDSTDKADLRLIYLALAHMIKFRGHFLIEGDLNPDNSDVDKLFIQLVQTYNQLFEENPINASGVDAKAILSARLSKSRRLENLIAQLPGEKKNGLFGNLIALSLGLTPNFKSNFDLAEDAKLQLSKDTYDDDLDNLLAQIGDQYADLFLAAKNLSDAILLSDILRVNTEITKAPLSASMIKRYDEHHQDLTLLKALVRQQLPEKYKEIFFDQSKNGYAGYIDGGASQEEFYKFIKPILEKMDGTEELLVKLNREDLLRKQRTFDNGSIPHQIHLGELHAILRRQEDFYPFLKDNREKIEKILTFRIPYYVGPLARGNSRFAWMTRKSEETITPWNFEEVVDKGASAQSFIERMTNFDKNLPNEKVLPKHSLLYEYFTVYNELTKVKYVTEGMRKPAFLSGEQKKAIVDLLFKTNRKVTVKQLKEDYFKKIECFDSVEISGVEDRFNASLGTYHDLLKIIKDKDFLDNEENEDILEDIVLTLTLFEDREMIEERLKTYAHLFDDKVMKQLKRRRYTGWGRLSRKLINGIRDKQSGKTILDFLKSDGFANRNFMQLIHDDSLTFKEDIQKAQVSGQGDSLHEHIANLAGSPAIKKGILQTVKVVDELVKVMGRHKPENIVIEMARENQTTQKGQKNSRERMKRIEEGIKELGSQILKEHPVENTQLQNEKLYLYYLQNGRDMYVDQELDINRLSDYDVDHIVPQSFLKDDSIDNKVLTRSDKNRGKSDNVPSEEVVKKMKNYWRQLLNAKLITQRKFDNLTKAERGGLSELDKAGFIKRQLVETRQITKHVAQILDSRMNTKYDENDKLIREVKVITLKSKLVSDFRKDFQFYKVREINNYHHAHDAYLNAVVGTALIKKYPKLESEFVYGDYKVYDVRKMIAKSEQEIGKATAKYFFYSNIMNFFKTEITLANGEIRKRPLIETNGETGEIVWDKGRDFATVRKVLSMPQVNIVKKTEVQTGGFSKESILPKRNSDKLIARKKDWDPKKYGGFDSPTVAYSVLVVAKVEKGKSKKLKSVKELLGITIMERSSFEKNPIDFLEAKGYKEVKKDLIIKLPKYSLFELENGRKRMLASAGELQKGNELALPSKYVNFLYLASHYEKLKGSPEDNEQKQLFVEQHKHYLDEIIEQISEFSKRVILADANLDKVLSAYNKHRDKPIREQAENIIHLFTLTNLGAPAAFKYFDTTIDRKRYTSTKEVLDATLIHQSITGLYETRIDLSQLGGDAPKKKRKVGIHGVPAAAGDMRAANLWPSPLMIKRSKKNSLALSLTADQMVSALLDAEPPILYSEYDPTRPFSEASMMGLLTNLADRELVHMINWAKRVPGFVDLTLHDQVHLLECAWLEILMIGLVWRSMEHPVKLLFAPNLLLDRNQGKCVEGMVEIFDMLLATSSRFRMMNLQGEEFVCLKSIILLNSGVYTFLSSTLKSLEEKDHIHRVLDKITDTLIHLMAKAGLTLQQQHQRLAQLLLILSHIRHMSNKGMEHLYSMKCKNVVPLYDLLLEAADAHRLHAPTSRGGASVEETDQSHLATAGSTSSHSLQKYYITGEAEGFPATA

SEQ ID NO: 297 - protein, 2030 aa, Artificial Sequence
  #Cas9 variant 3
SRADPKKKRKVTGAGDMRAANLWPSPLMIKRSKKNSLALSLTADQMVSALLDAEPPILYSEYDPTRPFSEASMMGLLTNLADRELVHMINWAKRVPGFVDLTLHDQVHLLECAWLEILMIGLVWRSMEHPVKLLFAPNLLLDRNQGKCVEGMVEIFDMLLATSSRFRMMNLQGEEFVCLKSIILLNSGVYTFLSSTLKSLEEKDHIHRVLDKITDTLIHLMAKAGLTLQQQHQRLAQLLLILSHIRHMSNKGMEHLYSMKCKNVVPLYDLLLEAADAHRLHAPTSRGGASVEETDQSHLATAGSTSSHSLQKYYITGEAEGFPATAGGSGGSGADKKYSIGLDIGTNSVGWAVITDEYKVPSKKFKVLGNTDRHSIKKNLIGALLFDSGETAEATRLKRTARRRYTRRKNRICYLQEIFSNEMAKVDDSFFHRLEESFLVEEDKKHERHPIFGNIVDEVAYHEKYPTIYHLRKKLVDSTDKADLRLIYLALAHMIKFRGHFLIEGDLNPDNSDVDKLFIQLVQTYNQLFEENPINASGVDAKAILSARLSKSRRLENLIAQLPGEKKNGLFGNLIALSLGLTPNFKSNFDLAEDAKLQLSKDTYDDDLDNLLAQIGDQYADLFLAAKNLSDAILLSDILRVNTEITKAPLSASMIKRYDEHHQDLTLLKALVRQQLPEKYKEIFFDQSKNGYAGYIDGGASQEEFYKFIKPILEKMDGTEELLVKLNREDLLRKQRTFDNGSIPHQIHLGELHAILRRQEDFYPFLKDNREKIEKILTFRIPYYVGPLARGNSRFAWMTRKSEETITPWNFEEVVDKGASAQSFIERMTNFDKNLPNEKVLPKHSLLYEYFTVYNELTKVKYVTEGMRKPAFLSGEQKKAIVDLLFKTNRKVTVKQLKEDYFKKIECFDSVEISGVEDRFNASLGTYHDLLKIIKDKDFLDNEENEDILEDIVLTLTLFEDREMIEERLKTYAHLFDDKVMKQLKRRRYTGWGRLSRKLINGIRDKQSGKTILDFLKSDGFANRNFMQLIHDDSLTFKEDIQKAQVSGQGDSLHEHIANLAGSPAIKKGILQTVKVVDELVKVMGRHKPENIVIEMARENQTTQKGQKNSRERMKRIEEGIKELGSQILKEHPVENTQLQNEKLYLYYLQNGRDMYVDQELDINRLSDYDVDHIVPQSFLKDDSIDNKVLTRSDKNRGKSDNVPSEEVVKKMKNYWRQLLNAKLITQRKFDNLTKAERGGLSELDKAGFIKRQLVETRQITKHVAQILDSRMNTKYDENDKLIREVKVITLKSKLVSDFRKDFQFYKVREINNYHHAHDAYLNAVVGTALIKKYPKLESEFVYGDYKVYDVRKMIAKSEQEIGKATAKYFFYSNIMNFFKTEITLANGEIRKRPLIETNGETGEIVWDKGRDFATVRKVLSMPQVNIVKKTEVQTGGFSKESILPKRNSDKLIARKKDWDPKKYGGFDSPTVAYSVLVVAKVEKGKSKKLKSVKELLGITIMERSSFEKNPIDFLEAKGYKEVKKDLIIKLPKYSLFELENGRKRMLASAGELQKGNELALPSKYVNFLYLASHYEKLKGSPEDNEQKQLFVEQHKHYLDEIIEQISEFSKRVILADANLDKVLSAYNKHRDKPIREQAENIIHLFTLTNLGAPAAFKYFDTTIDRKRYTSTKEVLDATLIHQSITGLYETRIDLSQLGGDAPKKKRKVGIHGVPAAAGDMRAANLWPSPLMIKRSKKNSLALSLTADQMVSALLDAEPPILYSEYDPTRPFSEASMMGLLTNLADRELVHMINWAKRVPGFVDLTLHDQVHLLECAWLEILMIGLVWRSMEHPVKLLFAPNLLLDRNQGKCVEGMVEIFDMLLATSSRFRMMNLQGEEFVCLKSIILLNSGVYTFLSSTLKSLEEKDHIHRVLDKITDTLIHLMAKAGLTLQQQHQRLAQLLLILSHIRHMSNKGMEHLYSMKCKNVVPLYDLLLEAADAHRLHAPTSRGGASVEETDQSHLATAGSTSSHSLQKYYITGEAEGFPATA

SEQ ID NO: 298 - protein, 2035 aa, Artificial Sequence
  #Cas9 variant 4
SRADPKKKRKVTGAGDMRAANLWPSPLMIKRSKKNSLALSLTADQMVSALLDAEPPILYSEYDPTRPFSEASMMGLLTNLADRELVHMINWAKRVPGFVDLTLHDQVHLLECAWLEILMIGLVWRSMEHPVKLLFAPNLLLDRNQGKCVEGMVEIFDMLLATSSRFRMMNLQGEEFVCLKSIILLNSGVYTFLSSTLKSLEEKDHIHRVLDKITDTLIHLMAKAGLTLQQQHQRLAQLLLILSHIRHMSNKGMEHLYSMKCKNVVPLYDLLLEAADAHRLHAPTSRGGASVEETDQSHLATAGSTSSHSLQKYYITGEAEGFPATAGTSESATPESGGADKKYSIGLDIGTNSVGWAVITDEYKVPSKKFKVLGNTDRHSIKKNLIGALLFDSGETAEATRLKRTARRRYTRRKNRICYLQEIFSNEMAKVDDSFFHRLEESFLVEEDKKHERHPIFGNIVDEVAYHEKYPTIYHLRKKLVDSTDKADLRLIYLALAHMIKFRGHFLIEGDLNPDNSDVDKLFIQLVQTYNQLFEENPINASGVDAKAILSARLSKSRRLENLIAQLPGEKKNGLFGNLIALSLGLTPNFKSNFDLAEDAKLQLSKDTYDDDLDNLLAQIGDQYADLFLAAKNLSDAILLSDILRVNTEITKAPLSASMIKRYDEHHQDLTLLKALVRQQLPEKYKEIFFDQSKNGYAGYIDGGASQEEFYKFIKPILEKMDGTEELLVKLNREDLLRKQRTFDNGSIPHQIHLGELHAILRRQEDFYPFLKDNREKIEKILTFRIPYYVGPLARGNSRFAWMTRKSEETITPWNFEEVVDKGASAQSFIERMTNFDKNLPNEKVLPKHSLLYEYFTVYNELTKVKYVTEGMRKPAFLSGEQKKAIVDLLFKTNRKVTVKQLKEDYFKKIECFDSVEISGVEDRFNASLGTYHDLLKIIKDKDFLDNEENEDILEDIVLTLTLFEDREMIEERLKTYAHLFDDKVMKQLKRRRYTGWGRLSRKLINGIRDKQSGKTILDFLKSDGFANRNFMQLIHDDSLTFKEDIQKAQVSGQGDSLHEHIANLAGSPAIKKGILQTVKVVDELVKVMGRHKPENIVIEMARENQTTQKGQKNSRERMKRIEEGIKELGSQILKEHPVENTQLQNEKLYLYYLQNGRDMYVDQELDINRLSDYDVDHIVPQSFLKDDSIDNKVLTRSDKNRGKSDNVPSEEVVKKMKNYWRQLLNAKLITQRKFDNLTKAERGGLSELDKAGFIKRQLVETRQITKHVAQILDSRMNTKYDENDKLIREVKVITLKSKLVSDFRKDFQFYKVREINNYHHAHDAYLNAVVGTALIKKYPKLESEFVYGDYKVYDVRKMIAKSEQEIGKATAKYFFYSNIMNFFKTEITLANGEIRKRPLIETNGETGEIVWDKGRDFATVRKVLSMPQVNIVKKTEVQTGGFSKESILPKRNSDKLIARKKDWDPKKYGGFDSPTVAYSVLVVAKVEKGKSKKLKSVKELLGITIMERSSFEKNPIDFLEAKGYKEVKKDLIIKLPKYSLFELENGRKRMLASAGELQKGNELALPSKYVNFLYLASHYEKLKGSPEDNEQKQLFVEQHKHYLDEIIEQISEFSKRVILADANLDKVLSAYNKHRDKPIREQAENIIHLFTLTNLGAPAAFKYFDTTIDRKRYTSTKEVLDATLIHQSITGLYETRIDLSQLGGDAPKKKRKVGIHGVPAAAGDMRAANLWPSPLMIKRSKKNSLALSLTADQMVSALLDAEPPILYSEYDPTRPFSEASMMGLLTNLADRELVHMINWAKRVPGFVDLTLHDQVHLLECAWLEILMIGLVWRSMEHPVKLLFAPNLLLDRNQGKCVEGMVEIFDMLLATSSRFRMMNLQGEEFVCLKSIILLNSGVYTFLSSTLKSLEEKDHIHRVLDKITDTLIHLMAKAGLTLQQQHQRLAQLLLILSHIRHMSNKGMEHLYSMKCKNVVPLYDLLLEAADAHRLHAPTSRGGASVEETDQSHLATAGSTSSHSLQKYYITGEAEGFPATA

SEQ ID NO: 299 - protein, 2032 aa, Artificial Sequence
  #Cas9 variant 5
SRADPKKKRKVTGAGDMRAANLWPSPLMIKRSKKNSLALSLTADQMVSALLDAEPPILYSEYDPTRPFSEASMMGLLTNLADRELVHMINWAKRVPGFVDLTLHDQVHLLECAWLEILMIGLVWRSMEHPVKLLFAPNLLLDRNQGKCVEGMVEIFDMLLATSSRFRMMNLQGEEFVCLKSIILLNSGVYTFLSSTLKSLEEKDHIHRVLDKITDTLIHLMAKAGLTLQQQHQRLAQLLLILSHIRHMSNKGMEHLYSMKCKNVVPLYDLLLEAADAHRLHAPTSRGGASVEETDQSHLATAGSTSSHSLQKYYITGEAEGFPATASGSETPGTGADKKYSIGLDIGTNSVGWAVITDEYKVPSKKFKVLGNTDRHSIKKNLIGALLFDSGETAEATRLKRTARRRYTRRKNRICYLQEIFSNEMAKVDDSFFHRLEESFLVEEDKKHERHPIFGNIVDEVAYHEKYPTIYHLRKKLVDSTDKADLRLIYLALAHMIKFRGHFLIEGDLNPDNSDVDKLFIQLVQTYNQLFEENPINASGVDAKAILSARLSKSRRLENLIAQLPGEKKNGLFGNLIALSLGLTPNFKSNFDLAEDAKLQLSKDTYDDDLDNLLAQIGDQYADLFLAAKNLSDAILLSDILRVNTEITKAPLSASMIKRYDEHHQDLTLLKALVRQQLPEKYKEIFFDQSKNGYAGYIDGGASQEEFYKFIKPILEKMDGTEELLVKLNREDLLRKQRTFDNGSIPHQIHLGELHAILRRQEDFYPFLKDNREKIEKILTFRIPYYVGPLARGNSRFAWMTRKSEETITPWNFEEVVDKGASAQSFIERMTNFDKNLPNEKVLPKHSLLYEYFTVYNELTKVKYVTEGMRKPAFLSGEQKKAIVDLLFKTNRKVTVKQLKEDYFKKIECFDSVEISGVEDRFNASLGTYHDLLKIIKDKDFLDNEENEDILEDIVLTLTLFEDREMIEERLKTYAHLFDDKVMKQLKRRRYTGWGRLSRKLINGIRDKQSGKTILDFLKSDGFANRNFMQLIHDDSLTFKEDIQKAQVSGQGDSLHEHIANLAGSPAIKKGILQTVKVVDELVKVMGRHKPENIVIEMARENQTTQKGQKNSRERMKRIEEGIKELGSQILKEHPVENTQLQNEKLYLYYLQNGRDMYVDQELDINRLSDYDVDHIVPQSFLKDDSIDNKVLTRSDKNRGKSDNVPSEEVVKKMKNYWRQLLNAKLITQRKFDNLTKAERGGLSELDKAGFIKRQLVETRQITKHVAQILDSRMNTKYDENDKLIREVKVITLKSKLVSDFRKDFQFYKVREINNYHHAHDAYLNAVVGTALIKKYPKLESEFVYGDYKVYDVRKMIAKSEQEIGKATAKYFFYSNIMNFFKTEITLANGEIRKRPLIETNGETGEIVWDKGRDFATVRKVLSMPQVNIVKKTEVQTGGFSKESILPKRNSDKLIARKKDWDPKKYGGFDSPTVAYSVLVVAKVEKGKSKKLKSVKELLGITIMERSSFEKNPIDFLEAKGYKEVKKDLIIKLPKYSLFELENGRKRMLASAGELQKGNELALPSKYVNFLYLASHYEKLKGSPEDNEQKQLFVEQHKHYLDEIIEQISEFSKRVILADANLDKVLSAYNKHRDKPIREQAENIIHLFTLTNLGAPAAFKYFDTTIDRKRYTSTKEVLDATLIHQSITGLYETRIDLSQLGGDAPKKKRKVGIHGVPAAAGDMRAANLWPSPLMIKRSKKNSLALSLTADQMVSALLDAEPPILYSEYDPTRPFSEASMMGLLTNLADRELVHMINWAKRVPGFVDLTLHDQVHLLECAWLEILMIGLVWRSMEHPVKLLFAPNLLLDRNQGKCVEGMVEIFDMLLATSSRFRMMNLQGEEFVCLKSIILLNSGVYTFLSSTLKSLEEKDHIHRVLDKITDTLIHLMAKAGLTLQQQHQRLAQLLLILSHIRHMSNKGMEHLYSMKCKNVVPLYDLLLEAADAHRLHAPTSRGGASVEETDQSHLATAGSTSSHSLQKYYITGEAEGFPATA

SEQ ID NO: 300 - protein, 2032 aa, Artificial Sequence
  #Cas9 variant 6
SRADPKKKRKVTGAGDMRAANLWPSPLMIKRSKKNSLALSLTADQMVSALLDAEPPILYSEYDPTRPFSEASMMGLLTNLADRELVHMINWAKRVPGFVDLTLHDQVHLLECAWLEILMIGLVWRSMEHPVKLLFAPNLLLDRNQGKCVEGMVEIFDMLLATSSRFRMMNLQGEEFVCLKSIILLNSGVYTFLSSTLKSLEEKDHIHRVLDKITDTLIHLMAKAGLTLQQQHQRLAQLLLILSHIRHMSNKGMEHLYSMKCKNVVPLYDLLLEAADAHRLHAPTSRGGASVEETDQSHLATAGSTSSHSLQKYYITGEAEGFPATASESATPESGADKKYSIGLDIGTNSVGWAVITDEYKVPSKKFKVLGNTDRHSIKKNLIGALLFDSGETAEATRLKRTARRRYTRRKNRICYLQEIFSNEMAKVDDSFFHRLEESFLVEEDKKHERHPIFGNIVDEVAYHEKYPTIYHLRKKLVDSTDKADLRLIYLALAHMIKFRGHFLIEGDLNPDNSDVDKLFIQLVQTYNQLFEENPINASGVDAKAILSARLSKSRRLENLIAQLPGEKKNGLFGNLIALSLGLTPNFKSNFDLAEDAKLQLSKDTYDDDLDNLLAQIGDQYADLFLAAKNLSDAILLSDILRVNTEITKAPLSASMIKRYDEHHQDLTLLKALVRQQLPEKYKEIFFDQSKNGYAGYIDGGASQEEFYKFIKPILEKMDGTEELLVKLNREDLLRKQRTFDNGSIPHQIHLGELHAILRRQEDFYPFLKDNREKIEKILTFRIPYYVGPLARGNSRFAWMTRKSEETITPWNFEEVVDKGASAQSFIERMTNFDKNLPNEKVLPKHSLLYEYFTVYNELTKVKYVTEGMRKPAFLSGEQKKAIVDLLFKTNRKVTVKQLKEDYFKKIECFDSVEISGVEDRFNASLGTYHDLLKIIKDKDFLDNEENEDILEDIVLTLTLFEDREMIEERLKTYAHLFDDKVMKQLKRRRYTGWGRLSRKLINGIRDKQSGKTILDFLKSDGFANRNFMQLIHDDSLTFKEDIQKAQVSGQGDSLHEHIANLAGSPAIKKGILQTVKVVDELVKVMGRHKPENIVIEMARENQTTQKGQKNSRERMKRIEEGIKELGSQILKEHPVENTQLQNEKLYLYYLQNGRDMYVDQELDINRLSDYDVDHIVPQSFLKDDSIDNKVLTRSDKNRGKSDNVPSEEVVKKMKNYWRQLLNAKLITQRKFDNLTKAERGGLSELDKAGFIKRQLVETRQITKHVAQILDSRMNTKYDENDKLIREVKVITLKSKLVSDFRKDFQFYKVREINNYHHAHDAYLNAVVGTALIKKYPKLESEFVYGDYKVYDVRKMIAKSEQEIGKATAKYFFYSNIMNFFKTEITLANGEIRKRPLIETNGETGEIVWDKGRDFATVRKVLSMPQVNIVKKTEVQTGGFSKESILPKRNSDKLIARKKDWDPKKYGGFDSPTVAYSVLVVAKVEKGKSKKLKSVKELLGITIMERSSFEKNPIDFLEAKGYKEVKKDLIIKLPKYSLFELENGRKRMLASAGELQKGNELALPSKYVNFLYLASHYEKLKGSPEDNEQKQLFVEQHKHYLDEIIEQISEFSKRVILADANLDKVLSAYNKHRDKPIREQAENIIHLFTLTNLGAPAAFKYFDTTIDRKRYTSTKEVLDATLIHQSITGLYETRIDLSQLGGDAPKKKRKVGIHGVPAAAGDMRAANLWPSPLMIKRSKKNSLALSLTADQMVSALLDAEPPILYSEYDPTRPFSEASMMGLLTNLADRELVHMINWAKRVPGFVDLTLHDQVHLLECAWLEILMIGLVWRSMEHPVKLLFAPNLLLDRNQGKCVEGMVEIFDMLLATSSRFRMMNLQGEEFVCLKSIILLNSGVYTFLSSTLKSLEEKDHIHRVLDKITDTLIHLMAKAGLTLQQQHQRLAQLLLILSHIRHMSNKGMEHLYSMKCKNVVPLYDLLLEAADAHRLHAPTSRGGASVEETDQSHLATAGSTSSHSLQKYYITGEAEGFPATA

SEQ ID NO: 301 - protein, 2035 aa, Artificial Sequence
  #Cas9 variant 7
SRADPKKKRKVTGGGSAGDMRAANLWPSPLMIKRSKKNSLALSLTADQMVSALLDAEPPILYSEYDPTRPFSEASMMGLLTNLADRELVHMINWAKRVPGFVDLTLHDQVHLLECAWLEILMIGLVWRSMEHPVKLLFAPNLLLDRNQGKCVEGMVEIFDMLLATSSRFRMMNLQGEEFVCLKSIILLNSGVYTFLSSTLKSLEEKDHIHRVLDKITDTLIHLMAKAGLTLQQQHQRLAQLLLILSHIRHMSNKGMEHLYSMKCKNVVPLYDLLLEAADAHRLHAPTSRGGASVEETDQSHLATAGSTSSHSLQKYYITGEAEGFPATASGSETPGTGADKKYSIGLDIGTNSVGWAVITDEYKVPSKKFKVLGNTDRHSIKKNLIGALLFDSGETAEATRLKRTARRRYTRRKNRICYLQEIFSNEMAKVDDSFFHRLEESFLVEEDKKHERHPIFGNIVDEVAYHEKYPTIYHLRKKLVDSTDKADLRLIYLALAHMIKFRGHFLIEGDLNPDNSDVDKLFIQLVQTYNQLFEENPINASGVDAKAILSARLSKSRRLENLIAQLPGEKKNGLFGNLIALSLGLTPNFKSNFDLAEDAKLQLSKDTYDDDLDNLLAQIGDQYADLFLAAKNLSDAILLSDILRVNTEITKAPLSASMIKRYDEHHQDLTLLKALVRQQLPEKYKEIFFDQSKNGYAGYIDGGASQEEFYKFIKPILEKMDGTEELLVKLNREDLLRKQRTFDNGSIPHQIHLGELHAILRRQEDFYPFLKDNREKIEKILTFRIPYYVGPLARGNSRFAWMTRKSEETITPWNFEEVVDKGASAQSFIERMTNFDKNLPNEKVLPKHSLLYEYFTVYNELTKVKYVTEGMRKPAFLSGEQKKAIVDLLFKTNRKVTVKQLKEDYFKKIECFDSVEISGVEDRFNASLGTYHDLLKIIKDKDFLDNEENEDILEDIVLTLTLFEDREMIEERLKTYAHLFDDKVMKQLKRRRYTGWGRLSRKLINGIRDKQSGKTILDFLKSDGFANRNFMQLIHDDSLTFKEDIQKAQVSGQGDSLHEHIANLAGSPAIKKGILQTVKVVDELVKVMGRHKPENIVIEMARENQTTQKGQKNSRERMKRIEEGIKELGSQILKEHPVENTQLQNEKLYLYYLQNGRDMYVDQELDINRLSDYDVDHIVPQSFLKDDSIDNKVLTRSDKNRGKSDNVPSEEVVKKMKNYWRQLLNAKLITQRKFDNLTKAERGGLSELDKAGFIKRQLVETRQITKHVAQILDSRMNTKYDENDKLIREVKVITLKSKLVSDFRKDFQFYKVREINNYHHAHDAYLNAVVGTALIKKYPKLESEFVYGDYKVYDVRKMIAKSEQEIGKATAKYFFYSNIMNFFKTEITLANGEIRKRPLIETNGETGEIVWDKGRDFATVRKVLSMPQVNIVKKTEVQTGGFSKESILPKRNSDKLIARKKDWDPKKYGGFDSPTVAYSVLVVAKVEKGKSKKLKSVKELLGITIMERSSFEKNPIDFLEAKGYKEVKKDLIIKLPKYSLFELENGRKRMLASAGELQKGNELALPSKYVNFLYLASHYEKLKGSPEDNEQKQLFVEQHKHYLDEIIEQISEFSKRVILADANLDKVLSAYNKHRDKPIREQAENIIHLFTLTNLGAPAAFKYFDTTIDRKRYTSTKEVLDATLIHQSITGLYETRIDLSQLGGDAPKKKRKVGIHGVPAAAGDMRAANLWPSPLMIKRSKKNSLALSLTADQMVSALLDAEPPILYSEYDPTRPFSEASMMGLLTNLADRELVHMINWAKRVPGFVDLTLHDQVHLLECAWLEILMIGLVWRSMEHPVKLLFAPNLLLDRNQGKCVEGMVEIFDMLLATSSRFRMMNLQGEEFVCLKSIILLNSGVYTFLSSTLKSLEEKDHIHRVLDKITDTLIHLMAKAGLTLQQQHQRLAQLLLILSHIRHMSNKGMEHLYSMKCKNVVPLYDLLLEAADAHRLHAPTSRGGASVEETDQSHLATAGSTSSHSLQKYYITGEAEGFPATA

SEQ ID NO: 302 - protein, 2037 aa, Artificial Sequence
  #Cas9 variant 8
SRADPKKKRKVTGGGSAGDMRAANLWPSPLMIKRSKKNSLALSLTADQMVSALLDAEPPILYSEYDPTRPFSEASMMGLLTNLADRELVHMINWAKRVPGFVDLTLHDQVHLLECAWLEILMIGLVWRSMEHPVKLLFAPNLLLDRNQGKCVEGMVEIFDMLLATSSRFRMMNLQGEEFVCLKSIILLNSGVYTFLSSTLKSLEEKDHIHRVLDKITDTLIHLMAKAGLTLQQQHQRLAQLLLILSHIRHMSNKGMEHLYSMKCKNVVPLYDLLLEAADAHRLHAPTSRGGASVEETDQSHLATAGSTSSHSLQKYYITGEAEGFPATASGSETPGTPGGADKKYSIGLDIGTNSVGWAVITDEYKVPSKKFKVLGNTDRHSIKKNLIGALLFDSGETAEATRLKRTARRRYTRRKNRICYLQEIFSNEMAKVDDSFFHRLEESFLVEEDKKHERHPIFGNIVDEVAYHEKYPTIYHLRKKLVDSTDKADLRLIYLALAHMIKFRGHFLIEGDLNPDNSDVDKLFIQLVQTYNQLFEENPINASGVDAKAILSARLSKSRRLENLIAQLPGEKKNGLFGNLIALSLGLTPNFKSNFDLAEDAKLQLSKDTYDDDLDNLLAQIGDQYADLFLAAKNLSDAILLSDILRVNTEITKAPLSASMIKRYDEHHQDLTLLKALVRQQLPEKYKEIFFDQSKNGYAGYIDGGASQEEFYKFIKPILEKMDGTEELLVKLNREDLLRKQRTFDNGSIPHQIHLGELHAILRRQEDFYPFLKDNREKIEKILTFRIPYYVGPLARGNSRFAWMTRKSEETITPWNFEEVVDKGASAQSFIERMTNFDKNLPNEKVLPKHSLLYEYFTVYNELTKVKYVTEGMRKPAFLSGEQKKAIVDLLFKTNRKVTVKQLKEDYFKKIECFDSVEISGVEDRFNASLGTYHDLLKIIKDKDFLDNEENEDILEDIVLTLTLFEDREMIEERLKTYAHLFDDKVMKQLKRRRYTGWGRLSRKLINGIRDKQSGKTILDFLKSDGFANRNFMQLIHDDSLTFKEDIQKAQVSGQGDSLHEHIANLAGSPAIKKGILQTVKVVDELVKVMGRHKPENIVIEMARENQTTQKGQKNSRERMKRIEEGIKELGSQILKEHPVENTQLQNEKLYLYYLQNGRDMYVDQELDINRLSDYDVDHIVPQSFLKDDSIDNKVLTRSDKNRGKSDNVPSEEVVKKMKNYWRQLLNAKLITQRKFDNLTKAERGGLSELDKAGFIKRQLVETRQITKHVAQILDSRMNTKYDENDKLIREVKVITLKSKLVSDFRKDFQFYKVREINNYHHAHDAYLNAVVGTALIKKYPKLESEFVYGDYKVYDVRKMIAKSEQEIGKATAKYFFYSNIMNFFKTEITLANGEIRKRPLIETNGETGEIVWDKGRDFATVRKVLSMPQVNIVKKTEVQTGGFSKESILPKRNSDKLIARKKDWDPKKYGGFDSPTVAYSVLVVAKVEKGKSKKLKSVKELLGITIMERSSFEKNPIDFLEAKGYKEVKKDLIIKLPKYSLFELENGRKRMLASAGELQKGNELALPSKYVNFLYLASHYEKLKGSPEDNEQKQLFVEQHKHYLDEIIEQISEFSKRVILADANLDKVLSAYNKHRDKPIREQAENIIHLFTLTNLGAPAAFKYFDTTIDRKRYTSTKEVLDATLIHQSITGLYETRIDLSQLGGDAPKKKRKVGIHGVPAAAGDMRAANLWPSPLMIKRSKKNSLALSLTADQMVSALLDAEPPILYSEYDPTRPFSEASMMGLLTNLADRELVHMINWAKRVPGFVDLTLHDQVHLLECAWLEILMIGLVWRSMEHPVKLLFAPNLLLDRNQGKCVEGMVEIFDMLLATSSRFRMMNLQGEEFVCLKSIILLNSGVYTFLSSTLKSLEEKDHIHRVLDKITDTLIHLMAKAGLTLQQQHQRLAQLLLILSHIRHMSNKGMEHLYSMKCKNVVPLYDLLLEAADAHRLHAPTSRGGASVEETDQSHLATAGSTSSHSLQKYYITGEAEGFPATA

SEQ ID NO: 303 - protein, 2031 aa, Artificial Sequence
  #Cas9 variant 9
SRADPKKKRKVTGAGDMRAANLWPSPLMIKRSKKNSLALSLTADQMVSALLDAEPPILYSEYDPTRPFSEASMMGLLTNLADRELVHMINWAKRVPGFVDLTLHDQVHLLECAWLEILMIGLVWRSMEHPVKLLFAPNLLLDRNQGKCVEGMVEIFDMLLATSSRFRMMNLQGEEFVCLKSIILLNSGVYTFLSSTLKSLEEKDHIHRVLDKITDTLIHLMAKAGLTLQQQHQRLAQLLLILSHIRHMSNKGMEHLYSMKCKNVVPLYDLLLEAADAHRLHAPTSRGGASVEETDQSHLATAGSTSSHSLQKYYITGEAEGFPATAGASGSKTPGDKKYSIGLDIGTNSVGWAVITDEYKVPSKKFKVLGNTDRHSIKKNLIGALLFDSGETAEATRLKRTARRRYTRRKNRICYLQEIFSNEMAKVDDSFFHRLEESFLVEEDKKHERHPIFGNIVDEVAYHEKYPTIYHLRKKLVDSTDKADLRLIYLALAHMIKFRGHFLIEGDLNPDNSDVDKLFIQLVQTYNQLFEENPINASGVDAKAILSARLSKSRRLENLIAQLPGEKKNGLFGNLIALSLGLTPNFKSNFDLAEDAKLQLSKDTYDDDLDNLLAQIGDQYADLFLAAKNLSDAILLSDILRVNTEITKAPLSASMIKRYDEHHQDLTLLKALVRQQLPEKYKEIFFDQSKNGYAGYIDGGASQEEFYKFIKPILEKMDGTEELLVKLNREDLLRKQRTFDNGSIPHQIHLGELHAILRRQEDFYPFLKDNREKIEKILTFRIPYYVGPLARGNSRFAWMTRKSEETITPWNFEEVVDKGASAQSFIERMTNFDKNLPNEKVLPKHSLLYEYFTVYNELTKVKYVTEGMRKPAFLSGEQKKAIVDLLFKTNRKVTVKQLKEDYFKKIECFDSVEISGVEDRFNASLGTYHDLLKIIKDKDFLDNEENEDILEDIVLTLTLFEDREMIEERLKTYAHLFDDKVMKQLKRRRYTGWGRLSRKLINGIRDKQSGKTILDFLKSDGFANRNFMQLIHDDSLTFKEDIQKAQVSGQGDSLHEHIANLAGSPAIKKGILQTVKVVDELVKVMGRHKPENIVIEMARENQTTQKGQKNSRERMKRIEEGIKELGSQILKEHPVENTQLQNEKLYLYYLQNGRDMYVDQELDINRLSDYDVDHIVPQSFLKDDSIDNKVLTRSDKNRGKSDNVPSEEVVKKMKNYWRQLLNAKLITQRKFDNLTKAERGGLSELDKAGFIKRQLVETRQITKHVAQILDSRMNTKYDENDKLIREVKVITLKSKLVSDFRKDFQFYKVREINNYHHAHDAYLNAVVGTALIKKYPKLESEFVYGDYKVYDVRKMIAKSEQEIGKATAKYFFYSNIMNFFKTEITLANGEIRKRPLIETNGETGEIVWDKGRDFATVRKVLSMPQVNIVKKTEVQTGGFSKESILPKRNSDKLIARKKDWDPKKYGGFDSPTVAYSVLVVAKVEKGKSKKLKSVKELLGITIMERSSFEKNPIDFLEAKGYKEVKKDLIIKLPKYSLFELENGRKRMLASAGELQKGNELALPSKYVNFLYLASHYEKLKGSPEDNEQKQLFVEQHKHYLDEIIEQISEFSKRVILADANLDKVLSAYNKHRDKPIREQAENIIHLFTLTNLGAPAAFKYFDTTIDRKRYTSTKEVLDATLIHQSITGLYETRIDLSQLGGDAPKKKRKVGIHGVPAAAGDMRAANLWPSPLMIKRSKKNSLALSLTADQMVSALLDAEPPILYSEYDPTRPFSEASMMGLLTNLADRELVHMINWAKRVPGFVDLTLHDQVHLLECAWLEILMIGLVWRSMEHPVKLLFAPNLLLDRNQGKCVEGMVEIFDMLLATSSRFRMMNLQGEEFVCLKSIILLNSGVYTFLSSTLKSLEEKDHIHRVLDKITDTLIHLMAKAGLTLQQQHQRLAQLLLILSHIRHMSNKGMEHLYSMKCKNVVPLYDLLLEAADAHRLHAPTSRGGASVEETDQSHLATAGSTSSHSLQKYYITGEAEGFPATA

SEQ ID NO: 304 - protein, 2028 aa, Artificial Sequence
  #Cas9 variant 10
SRADPKKKRKVTGAGDMRAANLWPSPLMIKRSKKNSLALSLTADQMVSALLDAEPPILYSEYDPTRPFSEASMMGLLTNLADRELVHMINWAKRVPGFVDLTLHDQVHLLECAWLEILMIGLVWRSMEHPVKLLFAPNLLLDRNQGKCVEGMVEIFDMLLATSSRFRMMNLQGEEFVCLKSIILLNSGVYTFLSSTLKSLEEKDHIHRVLDKITDTLIHLMAKAGLTLQQQHQRLAQLLLILSHIRHMSNKGMEHLYSMKCKNVVPLYDLLLEAADAHRLHAPTSRGGASVEETDQSHLATAGSTSSHSLQKYYITGEAEGFPATATPESGADKKYSIGLDIGTNSVGWAVITDEYKVPSKKFKVLGNTDRHSIKKNLIGALLFDSGETAEATRLKRTARRRYTRRKNRICYLQEIFSNEMAKVDDSFFHRLEESFLVEEDKKHERHPIFGNIVDEVAYHEKYPTIYHLRKKLVDSTDKADLRLIYLALAHMIKFRGHFLIEGDLNPDNSDVDKLFIQLVQTYNQLFEENPINASGVDAKAILSARLSKSRRLENLIAQLPGEKKNGLFGNLIALSLGLTPNFKSNFDLAEDAKLQLSKDTYDDDLDNLLAQIGDQYADLFLAAKNLSDAILLSDILRVNTEITKAPLSASMIKRYDEHHQDLTLLKALVRQQLPEKYKEIFFDQSKNGYAGYIDGGASQEEFYKFIKPILEKMDGTEELLVKLNREDLLRKQRTFDNGSIPHQIHLGELHAILRRQEDFYPFLKDNREKIEKILTFRIPYYVGPLARGNSRFAWMTRKSEETITPWNFEEVVDKGASAQSFIERMTNFDKNLPNEKVLPKHSLLYEYFTVYNELTKVKYVTEGMRKPAFLSGEQKKAIVDLLFKTNRKVTVKQLKEDYFKKIECFDSVEISGVEDRFNASLGTYHDLLKIIKDKDFLDNEENEDILEDIVLTLTLFEDREMIEERLKTYAHLFDDKVMKQLKRRRYTGWGRLSRKLINGIRDKQSGKTILDFLKSDGFANRNFMQLIHDDSLTFKEDIQKAQVSGQGDSLHEHIANLAGSPAIKKGILQTVKVVDELVKVMGRHKPENIVIEMARENQTTQKGQKNSRERMKRIEEGIKELGSQILKEHPVENTQLQNEKLYLYYLQNGRDMYVDQELDINRLSDYDVDHIVPQSFLKDDSIDNKVLTRSDKNRGKSDNVPSEEVVKKMKNYWRQLLNAKLITQRKFDNLTKAERGGLSELDKAGFIKRQLVETRQITKHVAQILDSRMNTKYDENDKLIREVKVITLKSKLVSDFRKDFQFYKVREINNYHHAHDAYLNAVVGTALIKKYPKLESEFVYGDYKVYDVRKMIAKSEQEIGKATAKYFFYSNIMNFFKTEITLANGEIRKRPLIETNGETGEIVWDKGRDFATVRKVLSMPQVNIVKKTEVQTGGFSKESILPKRNSDKLIARKKDWDPKKYGGFDSPTVAYSVLVVAKVEKGKSKKLKSVKELLGITIMERSSFEKNPIDFLEAKGYKEVKKDLIIKLPKYSLFELENGRKRMLASAGELQKGNELALPSKYVNFLYLASHYEKLKGSPEDNEQKQLFVEQHKHYLDEIIEQISEFSKRVILADANLDKVLSAYNKHRDKPIREQAENIIHLFTLTNLGAPAAFKYFDTTIDRKRYTSTKEVLDATLIHQSITGLYETRIDLSQLGGDAPKKKRKVGIHGVPAAAGDMRAANLWPSPLMIKRSKKNSLALSLTADQMVSALLDAEPPILYSEYDPTRPFSEASMMGLLTNLADRELVHMINWAKRVPGFVDLTLHDQVHLLECAWLEILMIGLVWRSMEHPVKLLFAPNLLLDRNQGKCVEGMVEIFDMLLATSSRFRMMNLQGEEFVCLKSIILLNSGVYTFLSSTLKSLEEKDHIHRVLDKITDTLIHLMAKAGLTLQQQHQRLAQLLLILSHIRHMSNKGMEHLYSMKCKNVVPLYDLLLEAADAHRLHAPTSRGGASVEETDQSHLATAGSTSSHSLQKYYITGEAEGFPATA

SEQ ID NO: 305 - protein, 2028 aa, Artificial Sequence
  #Cas9 variant 11
SRADPKKKRKVTGPGGSAGDMRAANLWPSPLMIKRSKKNSLALSLTADQMVSALLDAEPPILYSEYDPTRPFSEASMMGLLTNLADRELVHMINWAKRVPGFVDLTLHDQVHLLECAWLEILMIGLVWRSMEHPVKLLFAPNLLLDRNQGKCVEGMVEIFDMLLATSSRFRMMNLQGEEFVCLKSIILLNSGVYTFLSSTLKSLEEKDHIHRVLDKITDTLIHLMAKAGLTLQQQHQRLAQLLLILSHIRHMSNKGMEHLYSMKCKNVVPLYDLLLEAADAHRLHAPTSRGGASVEETDQSHLATAGSTSSHSLQKYYITGEAEGFPATAGADKKYSIGLDIGTNSVGWAVITDEYKVPSKKFKVLGNTDRHSIKKNLIGALLFDSGETAEATRLKRTARRRYTRRKNRICYLQEIFSNEMAKVDDSFFHRLEESFLVEEDKKHERHPIFGNIVDEVAYHEKYPTIYHLRKKLVDSTDKADLRLIYLALAHMIKFRGHFLIEGDLNPDNSDVDKLFIQLVQTYNQLFEENPINASGVDAKAILSARLSKSRRLENLIAQLPGEKKNGLFGNLIALSLGLTPNFKSNFDLAEDAKLQLSKDTYDDDLDNLLAQIGDQYADLFLAAKNLSDAILLSDILRVNTEITKAPLSASMIKRYDEHHQDLTLLKALVRQQLPEKYKEIFFDQSKNGYAGYIDGGASQEEFYKFIKPILEKMDGTEELLVKLNREDLLRKQRTFDNGSIPHQIHLGELHAILRRQEDFYPFLKDNREKIEKILTFRIPYYVGPLARGNSRFAWMTRKSEETITPWNFEEVVDKGASAQSFIERMTNFDKNLPNEKVLPKHSLLYEYFTVYNELTKVKYVTEGMRKPAFLSGEQKKAIVDLLFKTNRKVTVKQLKEDYFKKIECFDSVEISGVEDRFNASLGTYHDLLKIIKDKDFLDNEENEDILEDIVLTLTLFEDREMIEERLKTYAHLFDDKVMKQLKRRRYTGWGRLSRKLINGIRDKQSGKTILDFLKSDGFANRNFMQLIHDDSLTFKEDIQKAQVSGQGDSLHEHIANLAGSPAIKKGILQTVKVVDELVKVMGRHKPENIVIEMARENQTTQKGQKNSRERMKRIEEGIKELGSQILKEHPVENTQLQNEKLYLYYLQNGRDMYVDQELDINRLSDYDVDHIVPQSFLKDDSIDNKVLTRSDKNRGKSDNVPSEEVVKKMKNYWRQLLNAKLITQRKFDNLTKAERGGLSELDKAGFIKRQLVETRQITKHVAQILDSRMNTKYDENDKLIREVKVITLKSKLVSDFRKDFQFYKVREINNYHHAHDAYLNAVVGTALIKKYPKLESEFVYGDYKVYDVRKMIAKSEQEIGKATAKYFFYSNIMNFFKTEITLANGEIRKRPLIETNGETGEIVWDKGRDFATVRKVLSMPQVNIVKKTEVQTGGFSKESILPKRNSDKLIARKKDWDPKKYGGFDSPTVAYSVLVVAKVEKGKSKKLKSVKELLGITIMERSSFEKNPIDFLEAKGYKEVKKDLIIKLPKYSLFELENGRKRMLASAGELQKGNELALPSKYVNFLYLASHYEKLKGSPEDNEQKQLFVEQHKHYLDEIIEQISEFSKRVILADANLDKVLSAYNKHRDKPIREQAENIIHLFTLTNLGAPAAFKYFDTTIDRKRYTSTKEVLDATLIHQSITGLYETRIDLSQLGGDAPKKKRKVGIHGVPAAAGDMRAANLWPSPLMIKRSKKNSLALSLTADQMVSALLDAEPPILYSEYDPTRPFSEASMMGLLTNLADRELVHMINWAKRVPGFVDLTLHDQVHLLECAWLEILMIGLVWRSMEHPVKLLFAPNLLLDRNQGKCVEGMVEIFDMLLATSSRFRMMNLQGEEFVCLKSIILLNSGVYTFLSSTLKSLEEKDHIHRVLDKITDTLIHLMAKAGLTLQQQHQRLAQLLLILSHIRHMSNKGMEHLYSMKCKNVVPLYDLLLEAADAHRLHAPTSRGGASVEETDQSHLATAGSTSSHSLQKYYITGEAEGFPATA

SEQ ID NO: 306 - protein, 2037 aa, Artificial Sequence
  #Cas9 variant 12
SRADPKKKRKVTGGGSAGDMRAANLWPSPLMIKRSKKNSLALSLTADQMVSALLDAEPPILYSEYDPTRPFSEASMMGLLTNLADRELVHMINWAKRVPGFVDLTLHDQVHLLECAWLEILMIGLVWRSMEHPVKLLFAPNLLLDRNQGKCVEGMVEIFDMLLATSSRFRMMNLQGEEFVCLKSIILLNSGVYTFLSSTLKSLEEKDHIHRVLDKITDTLIHLMAKAGLTLQQQHQRLAQLLLILSHIRHMSNKGMEHLYSMKCKNVVPLYDLLLEAADAHRLHAPTSRGGASVEETDQSHLATAGSTSSHSLQKYYITGEAEGFPATASGSETPGTSEGADKKYSIGLDIGTNSVGWAVITDEYKVPSKKFKVLGNTDRHSIKKNLIGALLFDSGETAEATRLKRTARRRYTRRKNRICYLQEIFSNEMAKVDDSFFHRLEESFLVEEDKKHERHPIFGNIVDEVAYHEKYPTIYHLRKKLVDSTDKADLRLIYLALAHMIKFRGHFLIEGDLNPDNSDVDKLFIQLVQTYNQLFEENPINASGVDAKAILSARLSKSRRLENLIAQLPGEKKNGLFGNLIALSLGLTPNFKSNFDLAEDAKLQLSKDTYDDDLDNLLAQIGDQYADLFLAAKNLSDAILLSDILRVNTEITKAPLSASMIKRYDEHHQDLTLLKALVRQQLPEKYKEIFFDQSKNGYAGYIDGGASQEEFYKFIKPILEKMDGTEELLVKLNREDLLRKQRTFDNGSIPHQIHLGELHAILRRQEDFYPFLKDNREKIEKILTFRIPYYVGPLARGNSRFAWMTRKSEETITPWNFEEVVDKGASAQSFIERMTNFDKNLPNEKVLPKHSLLYEYFTVYNELTKVKYVTEGMRKPAFLSGEQKKAIVDLLFKTNRKVTVKQLKEDYFKKIECFDSVEISGVEDRFNASLGTYHDLLKIIKDKDFLDNEENEDILEDIVLTLTLFEDREMIEERLKTYAHLFDDKVMKQLKRRRYTGWGRLSRKLINGIRDKQSGKTILDFLKSDGFANRNFMQLIHDDSLTFKEDIQKAQVSGQGDSLHEHIANLAGSPAIKKGILQTVKVVDELVKVMGRHKPENIVIEMARENQTTQKGQKNSRERMKRIEEGIKELGSQILKEHPVENTQLQNEKLYLYYLQNGRDMYVDQELDINRLSDYDVDHIVPQSFLKDDSIDNKVLTRSDKNRGKSDNVPSEEVVKKMKNYWRQLLNAKLITQRKFDNLTKAERGGLSELDKAGFIKRQLVETRQITKHVAQILDSRMNTKYDENDKLIREVKVITLKSKLVSDFRKDFQFYKVREINNYHHAHDAYLNAVVGTALIKKYPKLESEFVYGDYKVYDVRKMIAKSEQEIGKATAKYFFYSNIMNFFKTEITLANGEIRKRPLIETNGETGEIVWDKGRDFATVRKVLSMPQVNIVKKTEVQTGGFSKESILPKRNSDKLIARKKDWDPKKYGGFDSPTVAYSVLVVAKVEKGKSKKLKSVKELLGITIMERSSFEKNPIDFLEAKGYKEVKKDLIIKLPKYSLFELENGRKRMLASAGELQKGNELALPSKYVNFLYLASHYEKLKGSPEDNEQKQLFVEQHKHYLDEIIEQISEFSKRVILADANLDKVLSAYNKHRDKPIREQAENIIHLFTLTNLGAPAAFKYFDTTIDRKRYTSTKEVLDATLIHQSITGLYETRIDLSQLGGDAPKKKRKVGIHGVPAAAGDMRAANLWPSPLMIKRSKKNSLALSLTADQMVSALLDAEPPILYSEYDPTRPFSEASMMGLLTNLADRELVHMINWAKRVPGFVDLTLHDQVHLLECAWLEILMIGLVWRSMEHPVKLLFAPNLLLDRNQGKCVEGMVEIFDMLLATSSRFRMMNLQGEEFVCLKSIILLNSGVYTFLSSTLKSLEEKDHIHRVLDKITDTLIHLMAKAGLTLQQQHQRLAQLLLILSHIRHMSNKGMEHLYSMKCKNVVPLYDLLLEAADAHRLHAPTSRGGASVEETDQSHLATAGSTSSHSLQKYYITGEAEGFPATA

SEQ ID NO: 307 - protein, 2031 aa, Artificial Sequence
  #Cas9 variant 13
SRADPKKKRKVTGGGSAGDMRAANLWPSPLMIKRSKKNSLALSLTADQMVSALLDAEPPILYSEYDPTRPFSEASMMGLLTNLADRELVHMINWAKRVPGFVDLTLHDQVHLLECAWLEILMIGLVWRSMEHPVKLLFAPNLLLDRNQGKCVEGMVEIFDMLLATSSRFRMMNLQGEEFVCLKSIILLNSGVYTFLSSTLKSLEEKDHIHRVLDKITDTLIHLMAKAGLTLQQQHQRLAQLLLILSHIRHMSNKGMEHLYSMKCKNVVPLYDLLLEAADAHRLHAPTSRGGASVEETDQSHLATAGSTSSHSLQKYYITGEAEGFPATATPESGADKKYSIGLDIGTNSVGWAVITDEYKVPSKKFKVLGNTDRHSIKKNLIGALLFDSGETAEATRLKRTARRRYTRRKNRICYLQEIFSNEMAKVDDSFFHRLEESFLVEEDKKHERHPIFGNIVDEVAYHEKYPTIYHLRKKLVDSTDKADLRLIYLALAHMIKFRGHFLIEGDLNPDNSDVDKLFIQLVQTYNQLFEENPINASGVDAKAILSARLSKSRRLENLIAQLPGEKKNGLFGNLIALSLGLTPNFKSNFDLAEDAKLQLSKDTYDDDLDNLLAQIGDQYADLFLAAKNLSDAILLSDILRVNTEITKAPLSASMIKRYDEHHQDLTLLKALVRQQLPEKYKEIFFDQSKNGYAGYIDGGASQEEFYKFIKPILEKMDGTEELLVKLNREDLLRKQRTFDNGSIPHQIHLGELHAILRRQEDFYPFLKDNREKIEKILTFRIPYYVGPLARGNSRFAWMTRKSEETITPWNFEEVVDKGASAQSFIERMTNFDKNLPNEKVLPKHSLLYEYFTVYNELTKVKYVTEGMRKPAFLSGEQKKAIVDLLFKTNRKVTVKQLKEDYFKKIECFDSVEISGVEDRFNASLGTYHDLLKIIKDKDFLDNEENEDILEDIVLTLTLFEDREMIEERLKTYAHLFDDKVMKQLKRRRYTGWGRLSRKLINGIRDKQSGKTILDFLKSDGFANRNFMQLIHDDSLTFKEDIQKAQVSGQGDSLHEHIANLAGSPAIKKGILQTVKVVDELVKVMGRHKPENIVIEMARENQTTQKGQKNSRERMKRIEEGIKELGSQILKEHPVENTQLQNEKLYLYYLQNGRDMYVDQELDINRLSDYDVDHIVPQSFLKDDSIDNKVLTRSDKNRGKSDNVPSEEVVKKMKNYWRQLLNAKLITQRKFDNLTKAERGGLSELDKAGFIKRQLVETRQITKHVAQILDSRMNTKYDENDKLIREVKVITLKSKLVSDFRKDFQFYKVREINNYHHAHDAYLNAVVGTALIKKYPKLESEFVYGDYKVYDVRKMIAKSEQEIGKATAKYFFYSNIMNFFKTEITLANGEIRKRPLIETNGETGEIVWDKGRDFATVRKVLSMPQVNIVKKTEVQTGGFSKESILPKRNSDKLIARKKDWDPKKYGGFDSPTVAYSVLVVAKVEKGKSKKLKSVKELLGITIMERSSFEKNPIDFLEAKGYKEVKKDLIIKLPKYSLFELENGRKRMLASAGELQKGNELALPSKYVNFLYLASHYEKLKGSPEDNEQKQLFVEQHKHYLDEIIEQISEFSKRVILADANLDKVLSAYNKHRDKPIREQAENIIHLFTLTNLGAPAAFKYFDTTIDRKRYTSTKEVLDATLIHQSITGLYETRIDLSQLGGDAPKKKRKVGIHGVPAAAGDMRAANLWPSPLMIKRSKKNSLALSLTADQMVSALLDAEPPILYSEYDPTRPFSEASMMGLLTNLADRELVHMINWAKRVPGFVDLTLHDQVHLLECAWLEILMIGLVWRSMEHPVKLLFAPNLLLDRNQGKCVEGMVEIFDMLLATSSRFRMMNLQGEEFVCLKSIILLNSGVYTFLSSTLKSLEEKDHIHRVLDKITDTLIHLMAKAGLTLQQQHQRLAQLLLILSHIRHMSNKGMEHLYSMKCKNVVPLYDLLLEAADAHRLHAPTSRGGASVEETDQSHLATAGSTSSHSLQKYYITGEAEGFPATA

SEQ ID NO: 308 - protein, 2038 aa, Artificial Sequence
  #Cas9 variant 14
SRADPKKKRKVTGPGGSAGDTTGPGGSAGDMRAANLWPSPLMIKRSKKNSLALSLTADQMVSALLDAEPPILYSEYDPTRPFSEASMMGLLTNLADRELVHMINWAKRVPGFVDLTLHDQVHLLECAWLEILMIGLVWRSMEHPVKLLFAPNLLLDRNQGKCVEGMVEIFDMLLATSSRFRMMNLQGEEFVCLKSIILLNSGVYTFLSSTLKSLEEKDHIHRVLDKITDTLIHLMAKAGLTLQQQHQRLAQLLLILSHIRHMSNKGMEHLYSMKCKNVVPLYDLLLEAADAHRLHAPTSRGGASVEETDQSHLATAGSTSSHSLQKYYITGEAEGFPATAGADKKYSIGLDIGTNSVGWAVITDEYKVPSKKFKVLGNTDRHSIKKNLIGALLFDSGETAEATRLKRTARRRYTRRKNRICYLQEIFSNEMAKVDDSFFHRLEESFLVEEDKKHERHPIFGNIVDEVAYHEKYPTIYHLRKKLVDSTDKADLRLIYLALAHMIKFRGHFLIEGDLNPDNSDVDKLFIQLVQTYNQLFEENPINASGVDAKAILSARLSKSRRLENLIAQLPGEKKNGLFGNLIALSLGLTPNFKSNFDLAEDAKLQLSKDTYDDDLDNLLAQIGDQYADLFLAAKNLSDAILLSDILRVNTEITKAPLSASMIKRYDEHHQDLTLLKALVRQQLPEKYKEIFFDQSKNGYAGYIDGGASQEEFYKFIKPILEKMDGTEELLVKLNREDLLRKQRTFDNGSIPHQIHLGELHAILRRQEDFYPFLKDNREKIEKILTFRIPYYVGPLARGNSRFAWMTRKSEETITPWNFEEVVDKGASAQSFIERMTNFDKNLPNEKVLPKHSLLYEYFTVYNELTKVKYVTEGMRKPAFLSGEQKKAIVDLLFKTNRKVTVKQLKEDYFKKIECFDSVEISGVEDRFNASLGTYHDLLKIIKDKDFLDNEENEDILEDIVLTLTLFEDREMIEERLKTYAHLFDDKVMKQLKRRRYTGWGRLSRKLINGIRDKQSGKTILDFLKSDGFANRNFMQLIHDDSLTFKEDIQKAQVSGQGDSLHEHIANLAGSPAIKKGILQTVKVVDELVKVMGRHKPENIVIEMARENQTTQKGQKNSRERMKRIEEGIKELGSQILKEHPVENTQLQNEKLYLYYLQNGRDMYVDQELDINRLSDYDVDHIVPQSFLKDDSIDNKVLTRSDKNRGKSDNVPSEEVVKKMKNYWRQLLNAKLITQRKFDNLTKAERGGLSELDKAGFIKRQLVETRQITKHVAQILDSRMNTKYDENDKLIREVKVITLKSKLVSDFRKDFQFYKVREINNYHHAHDAYLNAVVGTALIKKYPKLESEFVYGDYKVYDVRKMIAKSEQEIGKATAKYFFYSNIMNFFKTEITLANGEIRKRPLIETNGETGEIVWDKGRDFATVRKVLSMPQVNIVKKTEVQTGGFSKESILPKRNSDKLIARKKDWDPKKYGGFDSPTVAYSVLVVAKVEKGKSKKLKSVKELLGITIMERSSFEKNPIDFLEAKGYKEVKKDLIIKLPKYSLFELENGRKRMLASAGELQKGNELALPSKYVNFLYLASHYEKLKGSPEDNEQKQLFVEQHKHYLDEIIEQISEFSKRVILADANLDKVLSAYNKHRDKPIREQAENIIHLFTLTNLGAPAAFKYFDTTIDRKRYTSTKEVLDATLIHQSITGLYETRIDLSQLGGDAPKKKRKVGIHGVPAAAGDMRAANLWPSPLMIKRSKKNSLALSLTADQMVSALLDAEPPILYSEYDPTRPFSEASMMGLLTNLADRELVHMINWAKRVPGFVDLTLHDQVHLLECAWLEILMIGLVWRSMEHPVKLLFAPNLLLDRNQGKCVEGMVEIFDMLLATSSRFRMMNLQGEEFVCLKSIILLNSGVYTFLSSTLKSLEEKDHIHRVLDKITDTLIHLMAKAGLTLQQQHQRLAQLLLILSHIRHMSNKGMEHLYSMKCKNVVPLYDLLLEAADAHRLHAPTSRGGASVEETDQSHLATAGSTSSHSLQKYYITGEAEGFPATA

SEQ ID NO: 309 - protein, 2035 aa, Artificial Sequence
  #Cas9 variant 15
SRADPKKKRKVTGGGSAGDMRAANLWPSPLMIKRSKKNSLALSLTADQMVSALLDAEPPILYSEYDPTRPFSEASMMGLLTNLADRELVHMINWAKRVPGFVDLTLHDQVHLLECAWLEILMIGLVWRSMEHPVKLLFAPNLLLDRNQGKCVEGMVEIFDMLLATSSRFRMMNLQGEEFVCLKSIILLNSGVYTFLSSTLKSLEEKDHIHRVLDKITDTLIHLMAKAGLTLQQQHQRLAQLLLILSHIRHMSNKGMEHLYSMKCKNVVPLYDLLLEAADAHRLHAPTSRGGASVEETDQSHLATAGSTSSHSLQKYYITGEAEGFPATASESATPESGADKKYSIGLDIGTNSVGWAVITDEYKVPSKKFKVLGNTDRHSIKKNLIGALLFDSGETAEATRLKRTARRRYTRRKNRICYLQEIFSNEMAKVDDSFFHRLEESFLVEEDKKHERHPIFGNIVDEVAYHEKYPTIYHLRKKLVDSTDKADLRLIYLALAHMIKFRGHFLIEGDLNPDNSDVDKLFIQLVQTYNQLFEENPINASGVDAKAILSARLSKSRRLENLIAQLPGEKKNGLFGNLIALSLGLTPNFKSNFDLAEDAKLQLSKDTYDDDLDNLLAQIGDQYADLFLAAKNLSDAILLSDILRVNTEITKAPLSASMIKRYDEHHQDLTLLKALVRQQLPEKYKEIFFDQSKNGYAGYIDGGASQEEFYKFIKPILEKMDGTEELLVKLNREDLLRKQRTFDNGSIPHQIHLGELHAILRRQEDFYPFLKDNREKIEKILTFRIPYYVGPLARGNSRFAWMTRKSEETITPWNFEEVVDKGASAQSFIERMTNFDKNLPNEKVLPKHSLLYEYFTVYNELTKVKYVTEGMRKPAFLSGEQKKAIVDLLFKTNRKVTVKQLKEDYFKKIECFDSVEISGVEDRFNASLGTYHDLLKIIKDKDFLDNEENEDILEDIVLTLTLFEDREMIEERLKTYAHLFDDKVMKQLKRRRYTGWGRLSRKLINGIRDKQSGKTILDFLKSDGFANRNFMQLIHDDSLTFKEDIQKAQVSGQGDSLHEHIANLAGSPAIKKGILQTVKVVDELVKVMGRHKPENIVIEMARENQTTQKGQKNSRERMKRIEEGIKELGSQILKEHPVENTQLQNEKLYLYYLQNGRDMYVDQELDINRLSDYDVDHIVPQSFLKDDSIDNKVLTRSDKNRGKSDNVPSEEVVKKMKNYWRQLLNAKLITQRKFDNLTKAERGGLSELDKAGFIKRQLVETRQITKHVAQILDSRMNTKYDENDKLIREVKVITLKSKLVSDFRKDFQFYKVREINNYHHAHDAYLNAVVGTALIKKYPKLESEFVYGDYKVYDVRKMIAKSEQEIGKATAKYFFYSNIMNFFKTEITLANGEIRKRPLIETNGETGEIVWDKGRDFATVRKVLSMPQVNIVKKTEVQTGGFSKESILPKRNSDKLIARKKDWDPKKYGGFDSPTVAYSVLVVAKVEKGKSKKLKSVKELLGITIMERSSFEKNPIDFLEAKGYKEVKKDLIIKLPKYSLFELENGRKRMLASAGELQKGNELALPSKYVNFLYLASHYEKLKGSPEDNEQKQLFVEQHKHYLDEIIEQISEFSKRVILADANLDKVLSAYNKHRDKPIREQAENIIHLFTLTNLGAPAAFKYFDTTIDRKRYTSTKEVLDATLIHQSITGLYETRIDLSQLGGDAPKKKRKVGIHGVPAAAGDMRAANLWPSPLMIKRSKKNSLALSLTADQMVSALLDAEPPILYSEYDPTRPFSEASMMGLLTNLADRELVHMINWAKRVPGFVDLTLHDQVHLLECAWLEILMIGLVWRSMEHPVKLLFAPNLLLDRNQGKCVEGMVEIFDMLLATSSRFRMMNLQGEEFVCLKSIILLNSGVYTFLSSTLKSLEEKDHIHRVLDKITDTLIHLMAKAGLTLQQQHQRLAQLLLILSHIRHMSNKGMEHLYSMKCKNVVPLYDLLLEAADAHRLHAPTSRGGASVEETDQSHLATAGSTSSHSLQKYYITGEAEGFPATA

SEQ ID NO: 310 - protein, 2031 aa, Artificial Sequence
  #Cas9 variant 16
SRADPKKKRKVTGGGSAGDMRAANLWPSPLMIKRSKKNSLALSLTADQMVSALLDAEPPILYSEYDPTRPFSEASMMGLLTNLADRELVHMINWAKRVPGFVDLTLHDQVHLLECAWLEILMIGLVWRSMEHPVKLLFAPNLLLDRNQGKCVEGMVEIFDMLLATSSRFRMMNLQGEEFVCLKSIILLNSGVYTFLSSTLKSLEEKDHIHRVLDKITDTLIHLMAKAGLTLQQQHQRLAQLLLILSHIRHMSNKGMEHLYSMKCKNVVPLYDLLLEAADAHRLHAPTSRGGASVEETDQSHLATAGSTSSHSLQKYYITGEAEGFPATASGSEGADKKYSIGLDIGTNSVGWAVITDEYKVPSKKFKVLGNTDRHSIKKNLIGALLFDSGETAEATRLKRTARRRYTRRKNRICYLQEIFSNEMAKVDDSFFHRLEESFLVEEDKKHERHPIFGNIVDEVAYHEKYPTIYHLRKKLVDSTDKADLRLIYLALAHMIKFRGHFLIEGDLNPDNSDVDKLFIQLVQTYNQLFEENPINASGVDAKAILSARLSKSRRLENLIAQLPGEKKNGLFGNLIALSLGLTPNFKSNFDLAEDAKLQLSKDTYDDDLDNLLAQIGDQYADLFLAAKNLSDAILLSDILRVNTEITKAPLSASMIKRYDEHHQDLTLLKALVRQQLPEKYKEIFFDQSKNGYAGYIDGGASQEEFYKFIKPILEKMDGTEELLVKLNREDLLRKQRTFDNGSIPHQIHLGELHAILRRQEDFYPFLKDNREKIEKILTFRIPYYVGPLARGNSRFAWMTRKSEETITPWNFEEVVDKGASAQSFIERMTNFDKNLPNEKVLPKHSLLYEYFTVYNELTKVKYVTEGMRKPAFLSGEQKKAIVDLLFKTNRKVTVKQLKEDYFKKIECFDSVEISGVEDRFNASLGTYHDLLKIIKDKDFLDNEENEDILEDIVLTLTLFEDREMIEERLKTYAHLFDDKVMKQLKRRRYTGWGRLSRKLINGIRDKQSGKTILDFLKSDGFANRNFMQLIHDDSLTFKEDIQKAQVSGQGDSLHEHIANLAGSPAIKKGILQTVKVVDELVKVMGRHKPENIVIEMARENQTTQKGQKNSRERMKRIEEGIKELGSQILKEHPVENTQLQNEKLYLYYLQNGRDMYVDQELDINRLSDYDVDHIVPQSFLKDDSIDNKVLTRSDKNRGKSDNVPSEEVVKKMKNYWRQLLNAKLITQRKFDNLTKAERGGLSELDKAGFIKRQLVETRQITKHVAQILDSRMNTKYDENDKLIREVKVITLKSKLVSDFRKDFQFYKVREINNYHHAHDAYLNAVVGTALIKKYPKLESEFVYGDYKVYDVRKMIAKSEQEIGKATAKYFFYSNIMNFFKTEITLANGEIRKRPLIETNGETGEIVWDKGRDFATVRKVLSMPQVNIVKKTEVQTGGFSKESILPKRNSDKLIARKKDWDPKKYGGFDSPTVAYSVLVVAKVEKGKSKKLKSVKELLGITIMERSSFEKNPIDFLEAKGYKEVKKDLIIKLPKYSLFELENGRKRMLASAGELQKGNELALPSKYVNFLYLASHYEKLKGSPEDNEQKQLFVEQHKHYLDEIIEQISEFSKRVILADANLDKVLSAYNKHRDKPIREQAENIIHLFTLTNLGAPAAFKYFDTTIDRKRYTSTKEVLDATLIHQSITGLYETRIDLSQLGGDAPKKKRKVGIHGVPAAAGDMRAANLWPSPLMIKRSKKNSLALSLTADQMVSALLDAEPPILYSEYDPTRPFSEASMMGLLTNLADRELVHMINWAKRVPGFVDLTLHDQVHLLECAWLEILMIGLVWRSMEHPVKLLFAPNLLLDRNQGKCVEGMVEIFDMLLATSSRFRMMNLQGEEFVCLKSIILLNSGVYTFLSSTLKSLEEKDHIHRVLDKITDTLIHLMAKAGLTLQQQHQRLAQLLLILSHIRHMSNKGMEHLYSMKCKNVVPLYDLLLEAADAHRLHAPTSRGGASVEETDQSHLATAGSTSSHSLQKYYITGEAEGFPATA

SEQ ID NO: 311 - protein, 2024 aa, Artificial Sequence
  #Cas9 variant 17
SRADPKKKRKVTGAGDMRAANLWPSPLMIKRSKKNSLALSLTADQMVSALLDAEPPILYSEYDPTRPFSEASMMGLLTNLADRELVHMINWAKRVPGFVDLTLHDQVHLLECAWLEILMIGLVWRSMEHPVKLLFAPNLLLDRNQGKCVEGMVEIFDMLLATSSRFRMMNLQGEEFVCLKSIILLNSGVYTFLSSTLKSLEEKDHIHRVLDKITDTLIHLMAKAGLTLQQQHQRLAQLLLILSHIRHMSNKGMEHLYSMKCKNVVPLYDLLLEAADAHRLHAPTSRGGASVEETDQSHLATAGSTSSHSLQKYYITGEAEGFPATAPGDKKYSIGLDIGTNSVGWAVITDEYKVPSKKFKVLGNTDRHSIKKNLIGALLFDSGETAEATRLKRTARRRYTRRKNRICYLQEIFSNEMAKVDDSFFHRLEESFLVEEDKKHERHPIFGNIVDEVAYHEKYPTIYHLRKKLVDSTDKADLRLIYLALAHMIKFRGHFLIEGDLNPDNSDVDKLFIQLVQTYNQLFEENPINASGVDAKAILSARLSKSRRLENLIAQLPGEKKNGLFGNLIALSLGLTPNFKSNFDLAEDAKLQLSKDTYDDDLDNLLAQIGDQYADLFLAAKNLSDAILLSDILRVNTEITKAPLSASMIKRYDEHHQDLTLLKALVRQQLPEKYKEIFFDQSKNGYAGYIDGGASQEEFYKFIKPILEKMDGTEELLVKLNREDLLRKQRTFDNGSIPHQIHLGELHAILRRQEDFYPFLKDNREKIEKILTFRIPYYVGPLARGNSRFAWMTRKSEETITPWNFEEVVDKGASAQSFIERMTNFDKNLPNEKVLPKHSLLYEYFTVYNELTKVKYVTEGMRKPAFLSGEQKKAIVDLLFKTNRKVTVKQLKEDYFKKIECFDSVEISGVEDRFNASLGTYHDLLKIIKDKDFLDNEENEDILEDIVLTLTLFEDREMIEERLKTYAHLFDDKVMKQLKRRRYTGWGRLSRKLINGIRDKQSGKTILDFLKSDGFANRNFMQLIHDDSLTFKEDIQKAQVSGQGDSLHEHIANLAGSPAIKKGILQTVKVVDELVKVMGRHKPENIVIEMARENQTTQKGQKNSRERMKRIEEGIKELGSQILKEHPVENTQLQNEKLYLYYLQNGRDMYVDQELDINRLSDYDVDHIVPQSFLKDDSIDNKVLTRSDKNRGKSDNVPSEEVVKKMKNYWRQLLNAKLITQRKFDNLTKAERGGLSELDKAGFIKRQLVETRQITKHVAQILDSRMNTKYDENDKLIREVKVITLKSKLVSDFRKDFQFYKVREINNYHHAHDAYLNAVVGTALIKKYPKLESEFVYGDYKVYDVRKMIAKSEQEIGKATAKYFFYSNIMNFFKTEITLANGEIRKRPLIETNGETGEIVWDKGRDFATVRKVLSMPQVNIVKKTEVQTGGFSKESILPKRNSDKLIARKKDWDPKKYGGFDSPTVAYSVLVVAKVEKGKSKKLKSVKELLGITIMERSSFEKNPIDFLEAKGYKEVKKDLIIKLPKYSLFELENGRKRMLASAGELQKGNELALPSKYVNFLYLASHYEKLKGSPEDNEQKQLFVEQHKHYLDEIIEQISEFSKRVILADANLDKVLSAYNKHRDKPIREQAENIIHLFTLTNLGAPAAFKYFDTTIDRKRYTSTKEVLDATLIHQSITGLYETRIDLSQLGGDAPKKKRKVGIHGVPAAAGDMRAANLWPSPLMIKRSKKNSLALSLTADQMVSALLDAEPPILYSEYDPTRPFSEASMMGLLTNLADRELVHMINWAKRVPGFVDLTLHDQVHLLECAWLEILMIGLVWRSMEHPVKLLFAPNLLLDRNQGKCVEGMVEIFDMLLATSSRFRMMNLQGEEFVCLKSIILLNSGVYTFLSSTLKSLEEKDHIHRVLDKITDTLIHLMAKAGLTLQQQHQRLAQLLLILSHIRHMSNKGMEHLYSMKCKNVVPLYDLLLEAADAHRLHAPTSRGGASVEETDQSHLATAGSTSSHSLQKYYITGEAEGFPATA

SEQ ID NO: 312 - protein, 2027 aa, Artificial Sequence
  #Cas9 variant 18
SRADPKKKRKVTGAGDMRAANLWPSPLMIKRSKKNSLALSLTADQMVSALLDAEPPILYSEYDPTRPFSEASMMGLLTNLADRELVHMINWAKRVPGFVDLTLHDQVHLLECAWLEILMIGLVWRSMEHPVKLLFAPNLLLDRNQGKCVEGMVEIFDMLLATSSRFRMMNLQGEEFVCLKSIILLNSGVYTFLSSTLKSLEEKDHIHRVLDKITDTLIHLMAKAGLTLQQQHQRLAQLLLILSHIRHMSNKGMEHLYSMKCKNVVPLYDLLLEAADAHRLHAPTSRGGASVEETDQSHLATAGSTSSHSLQKYYITGEAEGFPATAGADKKYSIGLDIGTNSVGWAVITDEYKVPSKKFKVLGNTDRHSIKKNLIGALLFDSGETAEATRLKRTARRRYTRRKNRICYLQEIFSNEMAKVDDSFFHRLEESFLVEEDKKHERHPIFGNIVDEVAYHEKYPTIYHLRKKLVDSTDKADLRLIYLALAHMIKFRGHFLIEGDLNPDNSDVDKLFIQLVQTYNQLFEENPINASGVDAKAILSARLSKSRRLENLIAQLPGEKKNGLFGNLIALSLGLTPNFKSNFDLAEDAKLQLSKDTYDDDLDNLLAQIGDQYADLFLAAKNLSDAILLSDILRVNTEITKAPLSASMIKRYDEHHQDLTLLKALVRQQLPEKYKEIFFDQSKNGYAGYIDGGASQEEFYKFIKPILEKMDGTEELLVKLNREDLLRKQRTFDNGSIPHQIHLGELHAILRRQEDFYPFLKDNREKIEKILTFRIPYYVGPLARGNSRFAWMTRKSEETITPWNFEEVVDKGASAQSFIERMTNFDKNLPNEKVLPKHSLLYEYFTVYNELTKVKYVTEGMRKPAFLSGEQKKAIVDLLFKTNRKVTVKQLKEDYFKKIECFDSVEISGVEDRFNASLGTYHDLLKIIKDKDFLDNEENEDILEDIVLTLTLFEDREMIEERLKTYAHLFDDKVMKQLKRRRYTGWGRLSRKLINGIRDKQSGKTILDFLKSDGFANRNFMQLIHDDSLTFKEDIQKAQVSGQGDSLHEHIANLAGSPAIKKGILQTVKVVDELVKVMGRHKPENIVIEMARENQTTQKGQKNSRERMKRIEEGIKELGSQILKEHPVENTQLQNEKLYLYYLQNGRDMYVDQELDINRLSDYDVDHIVPQSFLKDDSIDNKVLTRSDKNRGKSDNVPSEEVVKKMKNYWRQLLNAKLITQRKFDNLTKAERGGLSELDKAGFIKRQLVETRQITKHVAQILDSRMNTKYDENDKLIREVKVITLKSKLVSDFRKDFQFYKVREINNYHHAHDAYLNAVVGTALIKKYPKLESEFVYGDYKVYDVRKMIAKSEQEIGKATAKYFFYSNIMNFFKTEITLANGEIRKRPLIETNGETGEIVWDKGRDFATVRKVLSMPQVNIVKKTEVQTGGFSKESILPKRNSDKLIARKKDWDPKKYGGFDSPTVAYSVLVVAKVEKGKSKKLKSVKELLGITIMERSSFEKNPIDFLEAKGYKEVKKDLIIKLPKYSLFELENGRKRMLASAGELQKGNELALPSKYVNFLYLASHYEKLKGSPEDNEQKQLFVEQHKHYLDEIIEQISEFSKRVILADANLDKVLSAYNKHRDKPIREQAENIIHLFTLTNLGAPAAFKYFDTTIDRKRYTSTKEVLDATLIHQSITGLYETRIDLSQLGGDAPKKKRKVGIHGVPAASGSAGDMRAANLWPSPLMIKRSKKNSLALSLTADQMVSALLDAEPPILYSEYDPTRPFSEASMMGLLTNLADRELVHMINWAKRVPGFVDLTLHDQVHLLECAWLEILMIGLVWRSMEHPVKLLFAPNLLLDRNQGKCVEGMVEIFDMLLATSSRFRMMNLQGEEFVCLKSIILLNSGVYTFLSSTLKSLEEKDHIHRVLDKITDTLIHLMAKAGLTLQQQHQRLAQLLLILSHIRHMSNKGMEHLYSMKCKNVVPLYDLLLEAADAHRLHAPTSRGGASVEETDQSHLATAGSTSSHSLQKYYITGEAEGFPATA

SEQ ID NO: 313 - protein, 2028 aa, Artificial Sequence
  #Cas9 variant 19
SRADPKKKRKVTGAGDMRAANLWPSPLMIKRSKKNSLALSLTADQMVSALLDAEPPILYSEYDPTRPFSEASMMGLLTNLADRELVHMINWAKRVPGFVDLTLHDQVHLLECAWLEILMIGLVWRSMEHPVKLLFAPNLLLDRNQGKCVEGMVEIFDMLLATSSRFRMMNLQGEEFVCLKSIILLNSGVYTFLSSTLKSLEEKDHIHRVLDKITDTLIHLMAKAGLTLQQQHQRLAQLLLILSHIRHMSNKGMEHLYSMKCKNVVPLYDLLLEAADAHRLHAPTSRGGASVEETDQSHLATAGSTSSHSLQKYYITGEAEGFPATAGADKKYSIGLDIGTNSVGWAVITDEYKVPSKKFKVLGNTDRHSIKKNLIGALLFDSGETAEATRLKRTARRRYTRRKNRICYLQEIFSNEMAKVDDSFFHRLEESFLVEEDKKHERHPIFGNIVDEVAYHEKYPTIYHLRKKLVDSTDKADLRLIYLALAHMIKFRGHFLIEGDLNPDNSDVDKLFIQLVQTYNQLFEENPINASGVDAKAILSARLSKSRRLENLIAQLPGEKKNGLFGNLIALSLGLTPNFKSNFDLAEDAKLQLSKDTYDDDLDNLLAQIGDQYADLFLAAKNLSDAILLSDILRVNTEITKAPLSASMIKRYDEHHQDLTLLKALVRQQLPEKYKEIFFDQSKNGYAGYIDGGASQEEFYKFIKPILEKMDGTEELLVKLNREDLLRKQRTFDNGSIPHQIHLGELHAILRRQEDFYPFLKDNREKIEKILTFRIPYYVGPLARGNSRFAWMTRKSEETITPWNFEEVVDKGASAQSFIERMTNFDKNLPNEKVLPKHSLLYEYFTVYNELTKVKYVTEGMRKPAFLSGEQKKAIVDLLFKTNRKVTVKQLKEDYFKKIECFDSVEISGVEDRFNASLGTYHDLLKIIKDKDFLDNEENEDILEDIVLTLTLFEDREMIEERLKTYAHLFDDKVMKQLKRRRYTGWGRLSRKLINGIRDKQSGKTILDFLKSDGFANRNFMQLIHDDSLTFKEDIQKAQVSGQGDSLHEHIANLAGSPAIKKGILQTVKVVDELVKVMGRHKPENIVIEMARENQTTQKGQKNSRERMKRIEEGIKELGSQILKEHPVENTQLQNEKLYLYYLQNGRDMYVDQELDINRLSDYDVDHIVPQSFLKDDSIDNKVLTRSDKNRGKSDNVPSEEVVKKMKNYWRQLLNAKLITQRKFDNLTKAERGGLSELDKAGFIKRQLVETRQITKHVAQILDSRMNTKYDENDKLIREVKVITLKSKLVSDFRKDFQFYKVREINNYHHAHDAYLNAVVGTALIKKYPKLESEFVYGDYKVYDVRKMIAKSEQEIGKATAKYFFYSNIMNFFKTEITLANGEIRKRPLIETNGETGEIVWDKGRDFATVRKVLSMPQVNIVKKTEVQTGGFSKESILPKRNSDKLIARKKDWDPKKYGGFDSPTVAYSVLVVAKVEKGKSKKLKSVKELLGITIMERSSFEKNPIDFLEAKGYKEVKKDLIIKLPKYSLFELENGRKRMLASAGELQKGNELALPSKYVNFLYLASHYEKLKGSPEDNEQKQLFVEQHKHYLDEIIEQISEFSKRVILADANLDKVLSAYNKHRDKPIREQAENIIHLFTLTNLGAPAAFKYFDTTIDRKRYTSTKEVLDATLIHQSITGLYETRIDLSQLGGDAPKKKRKVGIHGVPAAGGGSAGDMRAANLWPSPLMIKRSKKNSLALSLTADQMVSALLDAEPPILYSEYDPTRPFSEASMMGLLTNLADRELVHMINWAKRVPGFVDLTLHDQVHLLECAWLEILMIGLVWRSMEHPVKLLFAPNLLLDRNQGKCVEGMVEIFDMLLATSSRFRMMNLQGEEFVCLKSIILLNSGVYTFLSSTLKSLEEKDHIHRVLDKITDTLIHLMAKAGLTLQQQHQRLAQLLLILSHIRHMSNKGMEHLYSMKCKNVVPLYDLLLEAADAHRLHAPTSRGGASVEETDQSHLATAGSTSSHSLQKYYITGEAEGFPATA

SEQ ID NO: 314 - protein, 2349 aa, Artificial Sequence; identical to SEQ ID NO: 239
  #Cas9 variant 20

SEQ ID NO: 315 - protein, 2352 aa, Artificial Sequence
  #Cas9 variant 21
SRADPKKKRKVTGGGSAGDMRAANLWPSPLMIKRSKKNSLALSLTADQMVSALLDAEPPILYSEYDPTRPFSEASMMGLLTNLADRELVHMINWAKRVPGFVDLTLHDQVHLLECAWLEILMIGLVWRSMEHPVKLLFAPNLLLDRNQGKCVEGMVEIFDMLLATSSRFRMMNLQGEEFVCLKSIILLNSGVYTFLSSTLKSLEEKDHIHRVLDKITDTLIHLMAKAGLTLQQQHQRLAQLLLILSHIRHMSNKGMEHLYSMKCKNVVPLYDLLLEAADAHRLHAPTSRGGASVEETDQSHLATAGSTSSHSLQKYYITGEAEGFPATAGGSPRGGSAGDMRAANLWPSPLMIKRSKKNSLALSLTADQMVSALLDAEPPILYSEYDPTRPFSEASMMGLLTNLADRELVHMINWAKRVPGFVDLTLHDQVHLLECAWLEILMIGLVWRSMEHPVKLLFAPNLLLDRNQGKCVEGMVEIFDMLLATSSRFRMMNLQGEEFVCLKSIILLNSGVYTFLSSTLKSLEEKDHIHRVLDKITDTLIHLMAKAGLTLQQQHQRLAQLLLILSHIRHMSNKGMEHLYSMKCKNVVPLYDLLLEAADAHRLHAPTSRGGASVEETDQSHLATAGSTSSHSLQKYYITGEAEGFPATATPESGADKKYSIGLDIGTNSVGWAVITDEYKVPSKKFKVLGNTDRHSIKKNLIGALLFDSGETAEATRLKRTARRRYTRRKNRICYLQEIFSNEMAKVDDSFFHRLEESFLVEEDKKHERHPIFGNIVDEVAYHEKYPTIYHLRKKLVDSTDKADLRLIYLALAHMIKFRGHFLIEGDLNPDNSDVDKLFIQLVQTYNQLFEENPINASGVDAKAILSARLSKSRRLENLIAQLPGEKKNGLFGNLIALSLGLTPNFKSNFDLAEDAKLQLSKDTYDDDLDNLLAQIGDQYADLFLAAKNLSDAILLSDILRVNTEITKAPLSASMIKRYDEHHQDLTLLKALVRQQLPEKYKEIFFDQSKNGYAGYIDGGASQEEFYKFIKPILEKMDGTEELLVKLNREDLLRKQRTFDNGSIPHQIHLGELHAILRRQEDFYPFLKDNREKIEKILTFRIPYYVGPLARGNSRFAWMTRKSEETITPWNFEEVVDKGASAQSFIERMTNFDKNLPNEKVLPKHSLLYEYFTVYNELTKVKYVTEGMRKPAFLSGEQKKAIVDLLFKTNRKVTVKQLKEDYFKKIECFDSVEISGVEDRFNASLGTYHDLLKIIKDKDFLDNEENEDILEDIVLTLTLFEDREMIEERLKTYAHLFDDKVMKQLKRRRYTGWGRLSRKLINGIRDKQSGKTILDFLKSDGFANRNFMQLIHDDSLTFKEDIQKAQVSGQGDSLHEHIANLAGSPAIKKGILQTVKVVDELVKVMGRHKPENIVIEMARENQTTQKGQKNSRERMKRIEEGIKELGSQILKEHPVENTQLQNEKLYLYYLQNGRDMYVDQELDINRLSDYDVDHIVPQSFLKDDSIDNKVLTRSDKNRGKSDNVPSEEVVKKMKNYWRQLLNAKLITQRKFDNLTKAERGGLSELDKAGFIKRQLVETRQITKHVAQILDSRMNTKYDENDKLIREVKVITLKSKLVSDFRKDFQFYKVREINNYHHAHDAYLNAVVGTALIKKYPKLESEFVYGDYKVYDVRKMIAKSEQEIGKATAKYFFYSNIMNFFKTEITLANGEIRKRPLIETNGETGEIVWDKGRDFATVRKVLSMPQVNIVKKTEVQTGGFSKESILPKRNSDKLIARKKDWDPKKYGGFDSPTVAYSVLVVAKVEKGKSKKLKSVKELLGITIMERSSFEKNPIDFLEAKGYKEVKKDLIIKLPKYSLFELENGRKRMLASAGELQKGNELALPSKYVNFLYLASHYEKLKGSPEDNEQKQLFVEQHKHYLDEIIEQISEFSKRVILADANLDKVLSAYNKHRDKPIREQAENIIHLFTLTNLGAPAAFKYFDTTIDRKRYTSTKEVLDATLIHQSITGLYETRIDLSQLGGDAPKKKRKVGIHGVPAAAGDMRAANLWPSPLMIKRSKKNSLALSLTADQMVSALLDAEPPILYSEYDPTRPFSEASMMGLLTNLADRELVHMINWAKRVPGFVDLTLHDQVHLLECAWLEILMIGLVWRSMEHPVKLLFAPNLLLDRNQGKCVEGMVEIFDMLLATSSRFRMMNLQGEEFVCLKSIILLNSGVYTFLSSTLKSLEEKDHIHRVLDKITDTLIHLMAKAGLTLQQQHQRLAQLLLILSHIRHMSNKGMEHLYSMKCKNVVPLYDLLLEAADAHRLHAPTSRGGASVEETDQSHLATAGSTSSHSLQKYYITGEAEGFPATA

SEQ ID NO: 316 - protein, 2349 aa, Artificial Sequence
  #Cas9 variant 22
SRADPKKKRKVTGGGSAGDMRAANLWPSPLMIKRSKKNSLALSLTADQMVSALLDAEPPILYSEYDPTRPFSEASMMGLLTNLADRELVHMINWAKRVPGFVDLTLHDQVHLLECAWLEILMIGLVWRSMEHPVKLLFAPNLLLDRNQGKCVEGMVEIFDMLLATSSRFRMMNLQGEEFVCLKSIILLNSGVYTFLSSTLKSLEEKDHIHRVLDKITDTLIHLMAKAGLTLQQQHQRLAQLLLILSHIRHMSNKGMEHLYSMKCKNVVPLYDLLLEAADAHRLHAPTSRGGASVEETDQSHLATAGSTSSHSLQKYYITGEAEGFPATAPRGGSAGDMRAANLWPSPLMIKRSKKNSLALSLTADQMVSALLDAEPPILYSEYDPTRPFSEASMMGLLTNLADRELVHMINWAKRVPGFVDLTLHDQVHLLECAWLEILMIGLVWRSMEHPVKLLFAPNLLLDRNQGKCVEGMVEIFDMLLATSSRFRMMNLQGEEFVCLKSIILLNSGVYTFLSSTLKSLEEKDHIHRVLDKITDTLIHLMAKAGLTLQQQHQRLAQLLLILSHIRHMSNKGMEHLYSMKCKNVVPLYDLLLEAADAHRLHAPTSRGGASVEETDQSHLATAGSTSSHSLQKYYITGEAEGFPATATPESGADKKYSIGLDIGTNSVGWAVITDEYKVPSKKFKVLGNTDRHSIKKNLIGALLFDSGETAEATRLKRTARRRYTRRKNRICYLQEIFSNEMAKVDDSFFHRLEESFLVEEDKKHERHPIFGNIVDEVAYHEKYPTIYHLRKKLVDSTDKADLRLIYLALAHMIKFRGHFLIEGDLNPDNSDVDKLFIQLVQTYNQLFEENPINASGVDAKAILSARLSKSRRLENLIAQLPGEKKNGLFGNLIALSLGLTPNFKSNFDLAEDAKLQLSKDTYDDDLDNLLAQIGDQYADLFLAAKNLSDAILLSDILRVNTEITKAPLSASMIKRYDEHHQDLTLLKALVRQQLPEKYKEIFFDQSKNGYAGYIDGGASQEEFYKFIKPILEKMDGTEELLVKLNREDLLRKQRTFDNGSIPHQIHLGELHAILRRQEDFYPFLKDNREKIEKILTFRIPYYVGPLARGNSRFAWMTRKSEETITPWNFEEVVDKGASAQSFIERMTNFDKNLPNEKVLPKHSLLYEYFTVYNELTKVKYVTEGMRKPAFLSGEQKKAIVDLLFKTNRKVTVKQLKEDYFKKIECFDSVEISGVEDRFNASLGTYHDLLKIIKDKDFLDNEENEDILEDIVLTLTLFEDREMIEERLKTYAHLFDDKVMKQLKRRRYTGWGRLSRKLINGIRDKQSGKTILDFLKSDGFANRNFMQLIHDDSLTFKEDIQKAQVSGQGDSLHEHIANLAGSPAIKKGILQTVKVVDELVKVMGRHKPENIVIEMARENQTTQKGQKNSRERMKRIEEGIKELGSQILKEHPVENTQLQNEKLYLYYLQNGRDMYVDQELDINRLSDYDVDHIVPQSFLKDDSIDNKVLTRSDKNRGKSDNVPSEEVVKKMKNYWRQLLNAKLITQRKFDNLTKAERGGLSELDKAGFIKRQLVETRQITKHVAQILDSRMNTKYDENDKLIREVKVITLKSKLVSDFRKDFQFYKVREINNYHHAHDAYLNAVVGTALIKKYPKLESEFVYGDYKVYDVRKMIAKSEQEIGKATAKYFFYSNIMNFFKTEITLANGEIRKRPLIETNGETGEIVWDKGRDFATVRKVLSMPQVNIVKKTEVQTGGFSKESILPKRNSDKLIARKKDWDPKKYGGFDSPTVAYSVLVVAKVEKGKSKKLKSVKELLGITIMERSSFEKNPIDFLEAKGYKEVKKDLIIKLPKYSLFELENGRKRMLASAGELQKGNELALPSKYVNFLYLASHYEKLKGSPEDNEQKQLFVEQHKHYLDEIIEQISEFSKRVILADANLDKVLSAYNKHRDKPIREQAENIIHLFTLTNLGAPAAFKYFDTTIDRKRYTSTKEVLDATLIHQSITGLYETRIDLSQLGGDAPKKKRKVGIHGVPAAAGDMRAANLWPSPLMIKRSKKNSLALSLTADQMVSALLDAEPPILYSEYDPTRPFSEASMMGLLTNLADRELVHMINWAKRVPGFVDLTLHDQVHLLECAWLEILMIGLVWRSMEHPVKLLFAPNLLLDRNQGKCVEGMVEIFDMLLATSSRFRMMNLQGEEFVCLKSIILLNSGVYTFLSSTLKSLEEKDHIHRVLDKITDTLIHLMAKAGLTLQQQHQRLAQLLLILSHIRHMSNKGMEHLYSMKCKNVVPLYDLLLEAADAHRLHAPTSRGGASVEETDQSHLATAGSTSSHSLQKYYITGEAEGFPATA

SEQ ID NO: 317 - protein, 2340 aa, Artificial Sequence
  #Cas9 variant 23
SRADPKKKRKVTGAGDMRAANLWPSPLMIKRSKKNSLALSLTADQMVSALLDAEPPILYSEYDPTRPFSEASMMGLLTNLADRELVHMINWAKRVPGFVDLTLHDQVHLLECAWLEILMIGLVWRSMEHPVKLLFAPNLLLDRNQGKCVEGMVEIFDMLLATSSRFRMMNLQGEEFVCLKSIILLNSGVYTFLSSTLKSLEEKDHIHRVLDKITDTLIHLMAKAGLTLQQQHQRLAQLLLILSHIRHMSNKGMEHLYSMKCKNVVPLYDLLLEAADAHRLHAPTSRGGASVEETDQSHLATAGSTSSHSLQKYYITGEAEGFPATAGADKKYSIGLDIGTNSVGWAVITDEYKVPSKKFKVLGNTDRHSIKKNLIGALLFDSGETAEATRLKRTARRRYTRRKNRICYLQEIFSNEMAKVDDSFFHRLEESFLVEEDKKHERHPIFGNIVDEVAYHEKYPTIYHLRKKLVDSTDKADLRLIYLALAHMIKFRGHFLIEGDLNPDNSDVDKLFIQLVQTYNQLFEENPINASGVDAKAILSARLSKSRRLENLIAQLPGEKKNGLFGNLIALSLGLTPNFKSNFDLAEDAKLQLSKDTYDDDLDNLLAQIGDQYADLFLAAKNLSDAILLSDILRVNTEITKAPLSASMIKRYDEHHQDLTLLKALVRQQLPEKYKEIFFDQSKNGYAGYIDGGASQEEFYKFIKPILEKMDGTEELLVKLNREDLLRKQRTFDNGSIPHQIHLGELHAILRRQEDFYPFLKDNREKIEKILTFRIPYYVGPLARGNSRFAWMTRKSEETITPWNFEEVVDKGASAQSFIERMTNFDKNLPNEKVLPKHSLLYEYFTVYNELTKVKYVTEGMRKPAFLSGEQKKAIVDLLFKTNRKVTVKQLKEDYFKKIECFDSVEISGVEDRFNASLGTYHDLLKIIKDKDFLDNEENEDILEDIVLTLTLFEDREMIEERLKTYAHLFDDKVMKQLKRRRYTGWGRLSRKLINGIRDKQSGKTILDFLKSDGFANRNFMQLIHDDSLTFKEDIQKAQVSGQGDSLHEHIANLAGSPAIKKGILQTVKVVDELVKVMGRHKPENIVIEMARENQTTQKGQKNSRERMKRIEEGIKELGSQILKEHPVENTQLQNEKLYLYYLQNGRDMYVDQELDINRLSDYDVDHIVPQSFLKDDSIDNKVLTRSDKNRGKSDNVPSEEVVKKMKNYWRQLLNAKLITQRKFDNLTKAERGGLSELDKAGFIKRQLVETRQITKHVAQILDSRMNTKYDENDKLIREVKVITLKSKLVSDFRKDFQFYKVREINNYHHAHDAYLNAVVGTALIKKYPKLESEFVYGDYKVYDVRKMIAKSEQEIGKATAKYFFYSNIMNFFKTEITLANGEIRKRPLIETNGETGEIVWDKGRDFATVRKVLSMPQVNIVKKTEVQTGGFSKESILPKRNSDKLIARKKDWDPKKYGGFDSPTVAYSVLVVAKVEKGKSKKLKSVKELLGITIMERSSFEKNPIDFLEAKGYKEVKKDLIIKLPKYSLFELENGRKRMLASAGELQKGNELALPSKYVNFLYLASHYEKLKGSPEDNEQKQLFVEQHKHYLDEIIEQISEFSKRVILADANLDKVLSAYNKHRDKPIREQAENIIHLFTLTNLGAPAAFKYFDTTIDRKRYTSTKEVLDATLIHQSITGLYETRIDLSQLGGDAPKKKRKVGIHGVPAAAGDMRAANLWPSPLMIKRSKKNSLALSLTADQMVSALLDAEPPILYSEYDPTRPFSEASMMGLLTNLADRELVHMINWAKRVPGFVDLTLHDQVHLLECAWLEILMIGLVWRSMEHPVKLLFAPNLLLDRNQGKCVEGMVEIFDMLLATSSRFRMMNLQGEEFVCLKSIILLNSGVYTFLSSTLKSLEEKDHIHRVLDKITDTLIHLMAKAGLTLQQQHQRLAQLLLILSHIRHMSNKGMEHLYSMKCKNVVPLYDLLLEAADAHRLHAPTSRGGASVEETDQSHLATAGSTSSHSLQKYYITGEAEGFPATAPAGAGDMRAANLWPSPLMIKRSKKNSLALSLTADQMVSALLDAEPPILYSEYDPTRPFSEASMMGLLTNLADRELVHMINWAKRVPGFVDLTLHDQVHLLECAWLEILMIGLVWRSMEHPVKLLFAPNLLLDRNQGKCVEGMVEIFDMLLATSSRFRMMNLQGEEFVCLKSIILLNSGVYTFLSSTLKSLEEKDHIHRVLDKITDTLIHLMAKAGLTLQQQHQRLAQLLLILSHIRHMSNKGMEHLYSMKCKNVVPLYDLLLEAADAHRLHAPTSRGGASVEETDQSHLATAGSTSSHSLQKYYITGEAEGFPATA

SEQ ID NO: 318 - protein, 2343 aa, Artificial Sequence
  #Cas9 variant 24
SRADPKKKRKVTGAGDMRAANLWPSPLMIKRSKKNSLALSLTADQMVSALLDAEPPILYSEYDPTRPFSEASMMGLLTNLADRELVHMINWAKRVPGFVDLTLHDQVHLLECAWLEILMIGLVWRSMEHPVKLLFAPNLLLDRNQGKCVEGMVEIFDMLLATSSRFRMMNLQGEEFVCLKSIILLNSGVYTFLSSTLKSLEEKDHIHRVLDKITDTLIHLMAKAGLTLQQQHQRLAQLLLILSHIRHMSNKGMEHLYSMKCKNVVPLYDLLLEAADAHRLHAPTSRGGASVEETDQSHLATAGSTSSHSLQKYYITGEAEGFPATAGADKKYSIGLDIGTNSVGWAVITDEYKVPSKKFKVLGNTDRHSIKKNLIGALLFDSGETAEATRLKRTARRRYTRRKNRICYLQEIFSNEMAKVDDSFFHRLEESFLVEEDKKHERHPIFGNIVDEVAYHEKYPTIYHLRKKLVDSTDKADLRLIYLALAHMIKFRGHFLIEGDLNPDNSDVDKLFIQLVQTYNQLFEENPINASGVDAKAILSARLSKSRRLENLIAQLPGEKKNGLFGNLIALSLGLTPNFKSNFDLAEDAKLQLSKDTYDDDLDNLLAQIGDQYADLFLAAKNLSDAILLSDILRVNTEITKAPLSASMIKRYDEHHQDLTLLKALVRQQLPEKYKEIFFDQSKNGYAGYIDGGASQEEFYKFIKPILEKMDGTEELLVKLNREDLLRKQRTFDNGSIPHQIHLGELHAILRRQEDFYPFLKDNREKIEKILTFRIPYYVGPLARGNSRFAWMTRKSEETITPWNFEEVVDKGASAQSFIERMTNFDKNLPNEKVLPKHSLLYEYFTVYNELTKVKYVTEGMRKPAFLSGEQKKAIVDLLFKTNRKVTVKQLKEDYFKKIECFDSVEISGVEDRFNASLGTYHDLLKIIKDKDFLDNEENEDILEDIVLTLTLFEDREMIEERLKTYAHLFDDKVMKQLKRRRYTGWGRLSRKLINGIRDKQSGKTILDFLKSDGFANRNFMQLIHDDSLTFKEDIQKAQVSGQGDSLHEHIANLAGSPAIKKGILQTVKVVDELVKVMGRHKPENIVIEMARENQTTQKGQKNSRERMKRIEEGIKELGSQILKEHPVENTQLQNEKLYLYYLQNGRDMYVDQELDINRLSDYDVDHIVPQSFLKDDSIDNKVLTRSDKNRGKSDNVPSEEVVKKMKNYWRQLLNAKLITQRKFDNLTKAERGGLSELDKAGFIKRQLVETRQITKHVAQILDSRMNTKYDENDKLIREVKVITLKSKLVSDFRKDFQFYKVREINNYHHAHDAYLNAVVGTALIKKYPKLESEFVYGDYKVYDVRKMIAKSEQEIGKATAKYFFYSNIMNFFKTEITLANGEIRKRPLIETNGETGEIVWDKGRDFATVRKVLSMPQVNIVKKTEVQTGGFSKESILPKRNSDKLIARKKDWDPKKYGGFDSPTVAYSVLVVAKVEKGKSKKLKSVKELLGITIMERSSFEKNPIDFLEAKGYKEVKKDLIIKLPKYSLFELENGRKRMLASAGELQKGNELALPSKYVNFLYLASHYEKLKGSPEDNEQKQLFVEQHKHYLDEIIEQISEFSKRVILADANLDKVLSAYNKHRDKPIREQAENIIHLFTLTNLGAPAAFKYFDTTIDRKRYTSTKEVLDATLIHQSITGLYETRIDLSQLGGDAPKKKRKVGIHGVPAAAGDMRAANLWPSPLMIKRSKKNSLALSLTADQMVSALLDAEPPILYSEYDPTRPFSEASMMGLLTNLADRELVHMINWAKRVPGFVDLTLHDQVHLLECAWLEILMIGLVWRSMEHPVKLLFAPNLLLDRNQGKCVEGMVEIFDMLLATSSRFRMMNLQGEEFVCLKSIILLNSGVYTFLSSTLKSLEEKDHIHRVLDKITDTLIHLMAKAGLTLQQQHQRLAQLLLILSHIRHMSNKGMEHLYSMKCKNVVPLYDLLLEAADAHRLHAPTSRGGASVEETDQSHLATAGSTSSHSLQKYYITGEAEGFPATAPAGGGSAGDMRAANLWPSPLMIKRSKKNSLALSLTADQMVSALLDAEPPILYSEYDPTRPFSEASMMGLLTNLADRELVHMINWAKRVPGFVDLTLHDQVHLLECAWLEILMIGLVWRSMEHPVKLLFAPNLLLDRNQGKCVEGMVEIFDMLLATSSRFRMMNLQGEEFVCLKSIILLNSGVYTFLSSTLKSLEEKDHIHRVLDKITDTLIHLMAKAGLTLQQQHQRLAQLLLILSHIRHMSNKGMEHLYSMKCKNVVPLYDLLLEAADAHRLHAPTSRGGASVEETDQSHLATAGSTSSHSLQKYYITGEAEGFPATA

SEQ ID NO: 319 - protein, 2668 aa, Artificial Sequence
  #Cas9 variant 25
SRADPKKKRKVTGAGDMRAANLWPSPLMIKRSKKNSLALSLTADQMVSALLDAEPPILYSEYDPTRPFSEASMMGLLTNLADRELVHMINWAKRVPGFVDLTLHDQVHLLECAWLEILMIGLVWRSMEHPVKLLFAPNLLLDRNQGKCVEGMVEIFDMLLATSSRFRMMNLQGEEFVCLKSIILLNSGVYTFLSSTLKSLEEKDHIHRVLDKITDTLIHLMAKAGLTLQQQHQRLAQLLLILSHIRHMSNKGMEHLYSMKCKNVVPLYDLLLEAADAHRLHAPTSRGGASVEETDQSHLATAGSTSSHSLQKYYITGEAEGFPATAGGSPRGGSAGDMRAANLWPSPLMIKRSKKNSLALSLTADQMVSALLDAEPPILYSEYDPTRPFSEASMMGLLTNLADRELVHMINWAKRVPGFVDLTLHDQVHLLECAWLEILMIGLVWRSMEHPVKLLFAPNLLLDRNQGKCVEGMVEIFDMLLATSSRFRMMNLQGEEFVCLKSIILLNSGVYTFLSSTLKSLEEKDHIHRVLDKITDTLIHLMAKAGLTLQQQHQRLAQLLLILSHIRHMSNKGMEHLYSMKCKNVVPLYDLLLEAADAHRLHAPTSRGGASVEETDQSHLATAGSTSSHSLQKYYITGEAEGFPATATPESGADKKYSIGLDIGTNSVGWAVITDEYKVPSKKFKVLGNTDRHSIKKNLIGALLFDSGETAEATRLKRTARRRYTRRKNRICYLQEIFSNEMAKVDDSFFHRLEESFLVEEDKKHERHPIFGNIVDEVAYHEKYPTIYHLRKKLVDSTDKADLRLIYLALAHMIKFRGHFLIEGDLNPDNSDVDKLFIQLVQTYNQLFEENPINASGVDAKAILSARLSKSRRLENLIAQLPGEKKNGLFGNLIALSLGLTPNFKSNFDLAEDAKLQLSKDTYDDDLDNLLAQIGDQYADLFLAAKNLSDAILLSDILRVNTEITKAPLSASMIKRYDEHHQDLTLLKALVRQQLPEKYKEIFFDQSKNGYAGYIDGGASQEEFYKFIKPILEKMDGTEELLVKLNREDLLRKQRTFDNGSIPHQIHLGELHAILRRQEDFYPFLKDNREKIEKILTFRIPYYVGPLARGNSRFAWMTRKSEETITPWNFEEVVDKGASAQSFIERMTNFDKNLPNEKVLPKHSLLYEYFTVYNELTKVKYVTEGMRKPAFLSGEQKKAIVDLLFKTNRKVTVKQLKEDYFKKIECFDSVEISGVEDRFNASLGTYHDLLKIIKDKDFLDNEENEDILEDIVLTLTLFEDREMIEERLKTYAHLFDDKVMKQLKRRRYTGWGRLSRKLINGIRDKQSGKTILDFLKSDGFANRNFMQLIHDDSLTFKEDIQKAQVSGQGDSLHEHIANLAGSPAIKKGILQTVKVVDELVKVMGRHKPENIVIEMARENQTTQKGQKNSRERMKRIEEGIKELGSQILKEHPVENTQLQNEKLYLYYLQNGRDMYVDQELDINRLSDYDVDHIVPQSFLKDDSIDNKVLTRSDKNRGKSDNVPSEEVVKKMKNYWRQLLNAKLITQRKFDNLTKAERGGLSELDKAGFIKRQLVETRQITKHVAQILDSRMNTKYDENDKLIREVKVITLKSKLVSDFRKDFQFYKVREINNYHHAHDAYLNAVVGTALIKKYPKLESEFVYGDYKVYDVRKMIAKSEQEIGKATAKYFFYSNIMNFFKTEITLANGEIRKRPLIETNGETGEIVWDKGRDFATVRKVLSMPQVNIVKKTEVQTGGFSKESILPKRNSDKLIARKKDWDPKKYGGFDSPTVAYSVLVVAKVEKGKSKKLKSVKELLGITIMERSSFEKNPIDFLEAKGYKEVKKDLIIKLPKYSLFELENGRKRMLASAGELQKGNELALPSKYVNFLYLASHYEKLKGSPEDNEQKQLFVEQHKHYLDEIIEQISEFSKRVILADANLDKVLSAYNKHRDKPIREQAENIIHLFTLTNLGAPAAFKYFDTTIDRKRYTSTKEVLDATLIHQSITGLYETRIDLSQLGGDAPKKKRKVGIHGVPAAAGDMRAANLWPSPLMIKRSKKNSLALSLTADQMVSALLDAEPPILYSEYDPTRPFSEASMMGLLTNLADRELVHMINWAKRVPGFVDLTLHDQVHLLECAWLEILMIGLVWRSMEHPVKLLFAPNLLLDRNQGKCVEGMVEIFDMLLATSSRFRMMNLQGEEFVCLKSIILLNSGVYTFLSSTLKSLEEKDHIHRVLDKITDTLIHLMAKAGLTLQQQHQRLAQLLLILSHIRHMSNKGMEHLYSMKCKNVVPLYDLLLEAADAHRLHAPTSRGGASVEETDQSHLATAGSTSSHSLQKYYITGEAEGFPATAPAGGGSAGDMRAANLWPSPLMIKRSKKNSLALSLTADQMVSALLDAEPPILYSEYDPTRPFSEASMMGLLTNLADRELVHMINWAKRVPGFVDLTLHDQVHLLECAWLEILMIGLVWRSMEHPVKLLFAPNLLLDRNQGKCVEGMVEIFDMLLATSSRFRMMNLQGEEFVCLKSIILLNSGVYTFLSSTLKSLEEKDHIHRVLDKITDTLIHLMAKAGLTLQQQHQRLAQLLLILSHIRHMSNKGMEHLYSMKCKNVVPLYDLLLEAADAHRLHAPTSRGGASVEETDQSHLATAGSTSSHSLQKYYITGEAEGFPATA

SEQ ID NO: 320 - protein, 2671 aa, Artificial Sequence
  #Cas9 variant 26
SRADPKKKRKVTGGGSAGDMRAANLWPSPLMIKRSKKNSLALSLTADQMVSALLDAEPPILYSEYDPTRPFSEASMMGLLTNLADRELVHMINWAKRVPGFVDLTLHDQVHLLECAWLEILMIGLVWRSMEHPVKLLFAPNLLLDRNQGKCVEGMVEIFDMLLATSSRFRMMNLQGEEFVCLKSIILLNSGVYTFLSSTLKSLEEKDHIHRVLDKITDTLIHLMAKAGLTLQQQHQRLAQLLLILSHIRHMSNKGMEHLYSMKCKNVVPLYDLLLEAADAHRLHAPTSRGGASVEETDQSHLATAGSTSSHSLQKYYITGEAEGFPATAGGSPRGGSAGDMRAANLWPSPLMIKRSKKNSLALSLTADQMVSALLDAEPPILYSEYDPTRPFSEASMMGLLTNLADRELVHMINWAKRVPGFVDLTLHDQVHLLECAWLEILMIGLVWRSMEHPVKLLFAPNLLLDRNQGKCVEGMVEIFDMLLATSSRFRMMNLQGEEFVCLKSIILLNSGVYTFLSSTLKSLEEKDHIHRVLDKITDTLIHLMAKAGLTLQQQHQRLAQLLLILSHIRHMSNKGMEHLYSMKCKNVVPLYDLLLEAADAHRLHAPTSRGGASVEETDQSHLATAGSTSSHSLQKYYITGEAEGFPATATPESGADKKYSIGLDIGTNSVGWAVITDEYKVPSKKFKVLGNTDRHSIKKNLIGALLFDSGETAEATRLKRTARRRYTRRKNRICYLQEIFSNEMAKVDDSFFHRLEESFLVEEDKKHERHPIFGNIVDEVAYHEKYPTIYHLRKKLVDSTDKADLRLIYLALAHMIKFRGHFLIEGDLNPDNSDVDKLFIQLVQTYNQLFEENPINASGVDAKAILSARLSKSRRLENLIAQLPGEKKNGLFGNLIALSLGLTPNFKSNFDLAEDAKLQLSKDTYDDDLDNLLAQIGDQYADLFLAAKNLSDAILLSDILRVNTEITKAPLSASMIKRYDEHHQDLTLLKALVRQQLPEKYKEIFFDQSKNGYAGYIDGGASQEEFYKFIKPILEKMDGTEELLVKLNREDLLRKQRTFDNGSIPHQIHLGELHAILRRQEDFYPFLKDNREKIEKILTFRIPYYVGPLARGNSRFAWMTRKSEETITPWNFEEVVDKGASAQSFIERMTNFDKNLPNEKVLPKHSLLYEYFTVYNELTKVKYVTEGMRKPAFLSGEQKKAIVDLLFKTNRKVTVKQLKEDYFKKIECFDSVEISGVEDRFNASLGTYHDLLKIIKDKDFLDNEENEDILEDIVLTLTLFEDREMIEERLKTYAHLFDDKVMKQLKRRRYTGWGRLSRKLINGIRDKQSGKTILDFLKSDGFANRNFMQLIHDDSLTFKEDIQKAQVSGQGDSLHEHIANLAGSPAIKKGILQTVKVVDELVKVMGRHKPENIVIEMARENQTTQKGQKNSRERMKRIEEGIKELGSQILKEHPVENTQLQNEKLYLYYLQNGRDMYVDQELDINRLSDYDVDHIVPQSFLKDDSIDNKVLTRSDKNRGKSDNVPSEEVVKKMKNYWRQLLNAKLITQRKFDNLTKAERGGLSELDKAGFIKRQLVETRQITKHVAQILDSRMNTKYDENDKLIREVKVITLKSKLVSDFRKDFQFYKVREINNYHHAHDAYLNAVVGTALIKKYPKLESEFVYGDYKVYDVRKMIAKSEQEIGKATAKYFFYSNIMNFFKTEITLANGEIRKRPLIETNGETGEIVWDKGRDFATVRKVLSMPQVNIVKKTEVQTGGFSKESILPKRNSDKLIARKKDWDPKKYGGFDSPTVAYSVLVVAKVEKGKSKKLKSVKELLGITIMERSSFEKNPIDFLEAKGYKEVKKDLIIKLPKYSLFELENGRKRMLASAGELQKGNELALPSKYVNFLYLASHYEKLKGSPEDNEQKQLFVEQHKHYLDEIIEQISEFSKRVILADANLDKVLSAYNKHRDKPIREQAENIIHLFTLTNLGAPAAFKYFDTTIDRKRYTSTKEVLDATLIHQSITGLYETRIDLSQLGGDAPKKKRKVGIHGVPAAAGDMRAANLWPSPLMIKRSKKNSLALSLTADQMVSALLDAEPPILYSEYDPTRPFSEASMMGLLTNLADRELVHMINWAKRVPGFVDLTLHDQVHLLECAWLEILMIGLVWRSMEHPVKLLFAPNLLLDRNQGKCVEGMVEIFDMLLATSSRFRMMNLQGEEFVCLKSIILLNSGVYTFLSSTLKSLEEKDHIHRVLDKITDTLIHLMAKAGLTLQQQHQRLAQLLLILSHIRHMSNKGMEHLYSMKCKNVVPLYDLLLEAADAHRLHAPTSRGGASVEETDQSHLATAGSTSSHSLQKYYITGEAEGFPATAPAGGGSAGDMRAANLWPSPLMIKRSKKNSLALSLTADQMVSALLDAEPPILYSEYDPTRPFSEASMMGLLTNLADRELVHMINWAKRVPGFVDLTLHDQVHLLECAWLEILMIGLVWRSMEHPVKLLFAPNLLLDRNQGKCVEGMVEIFDMLLATSSRFRMMNLQGEEFVCLKSIILLNSGVYTFLSSTLKSLEEKDHIHRVLDKITDTLIHLMAKAGLTLQQQHQRLAQLLLILSHIRHMSNKGMEHLYSMKCKNVVPLYDLLLEAADAHRLHAPTSRGGASVEETDQSHLATAGSTSSHSLQKYYITGEAEGFPATA

SEQ ID NO: 321 - protein, 2665 aa, Artificial Sequence
  #Cas9 variant 27
SRADPKKKRKVTGGGSAGDMRAANLWPSPLMIKRSKKNSLALSLTADQMVSALLDAEPPILYSEYDPTRPFSEASMMGLLTNLADRELVHMINWAKRVPGFVDLTLHDQVHLLECAWLEILMIGLVWRSMEHPVKLLFAPNLLLDRNQGKCVEGMVEIFDMLLATSSRFRMMNLQGEEFVCLKSIILLNSGVYTFLSSTLKSLEEKDHIHRVLDKITDTLIHLMAKAGLTLQQQHQRLAQLLLILSHIRHMSNKGMEHLYSMKCKNVVPLYDLLLEAADAHRLHAPTSRGGASVEETDQSHLATAGSTSSHSLQKYYITGEAEGFPATAPRGGSAGDMRAANLWPSPLMIKRSKKNSLALSLTADQMVSALLDAEPPILYSEYDPTRPFSEASMMGLLTNLADRELVHMINWAKRVPGFVDLTLHDQVHLLECAWLEILMIGLVWRSMEHPVKLLFAPNLLLDRNQGKCVEGMVEIFDMLLATSSRFRMMNLQGEEFVCLKSIILLNSGVYTFLSSTLKSLEEKDHIHRVLDKITDTLIHLMAKAGLTLQQQHQRLAQLLLILSHIRHMSNKGMEHLYSMKCKNVVPLYDLLLEAADAHRLHAPTSRGGASVEETDQSHLATAGSTSSHSLQKYYITGEAEGFPATATPESGADKKYSIGLDIGTNSVGWAVITDEYKVPSKKFKVLGNTDRHSIKKNLIGALLFDSGETAEATRLKRTARRRYTRRKNRICYLQEIFSNEMAKVDDSFFHRLEESFLVEEDKKHERHPIFGNIVDEVAYHEKYPTIYHLRKKLVDSTDKADLRLIYLALAHMIKFRGHFLIEGDLNPDNSDVDKLFIQLVQTYNQLFEENPINASGVDAKAILSARLSKSRRLENLIAQLPGEKKNGLFGNLIALSLGLTPNFKSNFDLAEDAKLQLSKDTYDDDLDNLLAQIGDQYADLFLAAKNLSDAILLSDILRVNTEITKAPLSASMIKRYDEHHQDLTLLKALVRQQLPEKYKEIFFDQSKNGYAGYIDGGASQEEFYKFIKPILEKMDGTEELLVKLNREDLLRKQRTFDNGSIPHQIHLGELHAILRRQEDFYPFLKDNREKIEKILTFRIPYYVGPLARGNSRFAWMTRKSEETITPWNFEEVVDKGASAQSFIERMTNFDKNLPNEKVLPKHSLLYEYFTVYNELTKVKYVTEGMRKPAFLSGEQKKAIVDLLFKTNRKVTVKQLKEDYFKKIECFDSVEISGVEDRFNASLGTYHDLLKIIKDKDFLDNEENEDILEDIVLTLTLFEDREMIEERLKTYAHLFDDKVMKQLKRRRYTGWGRLSRKLINGIRDKQSGKTILDFLKSDGFANRNFMQLIHDDSLTFKEDIQKAQVSGQGDSLHEHIANLAGSPAIKKGILQTVKVVDELVKVMGRHKPENIVIEMARENQTTQKGQKNSRERMKRIEEGIKELGSQILKEHPVENTQLQNEKLYLYYLQNGRDMYVDQELDINRLSDYDVDHIVPQSFLKDDSIDNKVLTRSDKNRGKSDNVPSEEVVKKMKNYWRQLLNAKLITQRKFDNLTKAERGGLSELDKAGFIKRQLVETRQITKHVAQILDSRMNTKYDENDKLIREVKVITLKSKLVSDFRKDFQFYKVREINNYHHAHDAYLNAVVGTALIKKYPKLESEFVYGDYKVYDVRKMIAKSEQEIGKATAKYFFYSNIMNFFKTEITLANGEIRKRPLIETNGETGEIVWDKGRDFATVRKVLSMPQVNIVKKTEVQTGGFSKESILPKRNSDKLIARKKDWDPKKYGGFDSPTVAYSVLVVAKVEKGKSKKLKSVKELLGITIMERSSFEKNPIDFLEAKGYKEVKKDLIIKLPKYSLFELENGRKRMLASAGELQKGNELALPSKYVNFLYLASHYEKLKGSPEDNEQKQLFVEQHKHYLDEIIEQISEFSKRVILADANLDKVLSAYNKHRDKPIREQAENIIHLFTLTNLGAPAAFKYFDTTIDRKRYTSTKEVLDATLIHQSITGLYETRIDLSQLGGDAPKKKRKVGIHGVPAAAGDMRAANLWPSPLMIKRSKKNSLALSLTADQMVSALLDAEPPILYSEYDPTRPFSEASMMGLLTNLADRELVHMINWAKRVPGFVDLTLHDQVHLLECAWLEILMIGLVWRSMEHPVKLLFAPNLLLDRNQGKCVEGMVEIFDMLLATSSRFRMMNLQGEEFVCLKSIILLNSGVYTFLSSTLKSLEEKDHIHRVLDKITDTLIHLMAKAGLTLQQQHQRLAQLLLILSHIRHMSNKGMEHLYSMKCKNVVPLYDLLLEAADAHRLHAPTSRGGASVEETDQSHLATAGSTSSHSLQKYYITGEAEGFPATAPAGAGDMRAANLWPSPLMIKRSKKNSLALSLTADQMVSALLDAEPPILYSEYDPTRPFSEASMMGLLTNLADRELVHMINWAKRVPGFVDLTLHDQVHLLECAWLEILMIGLVWRSMEHPVKLLFAPNLLLDRNQGKCVEGMVEIFDMLLATSSRFRMMNLQGEEFVCLKSIILLNSGVYTFLSSTLKSLEEKDHIHRVLDKITDTLIHLMAKAGLTLQQQHQRLAQLLLILSHIRHMSNKGMEHLYSMKCKNVVPLYDLLLEAADAHRLHAPTSRGGASVEETDQSHLATAGSTSSHSLQKYYITGEAEGFPATA

SEQ ID NO: 322 - protein, 2668 aa, Artificial Sequence
  #Cas9 variant 28
SRADPKKKRKVTGGGSAGDMRAANLWPSPLMIKRSKKNSLALSLTADQMVSALLDAEPPILYSEYDPTRPFSEASMMGLLTNLADRELVHMINWAKRVPGFVDLTLHDQVHLLECAWLEILMIGLVWRSMEHPVKLLFAPNLLLDRNQGKCVEGMVEIFDMLLATSSRFRMMNLQGEEFVCLKSIILLNSGVYTFLSSTLKSLEEKDHIHRVLDKITDTLIHLMAKAGLTLQQQHQRLAQLLLILSHIRHMSNKGMEHLYSMKCKNVVPLYDLLLEAADAHRLHAPTSRGGASVEETDQSHLATAGSTSSHSLQKYYITGEAEGFPATAGGSPRGGSAGDMRAANLWPSPLMIKRSKKNSLALSLTADQMVSALLDAEPPILYSEYDPTRPFSEASMMGLLTNLADRELVHMINWAKRVPGFVDLTLHDQVHLLECAWLEILMIGLVWRSMEHPVKLLFAPNLLLDRNQGKCVEGMVEIFDMLLATSSRFRMMNLQGEEFVCLKSIILLNSGVYTFLSSTLKSLEEKDHIHRVLDKITDTLIHLMAKAGLTLQQQHQRLAQLLLILSHIRHMSNKGMEHLYSMKCKNVVPLYDLLLEAADAHRLHAPTSRGGASVEETDQSHLATAGSTSSHSLQKYYITGEAEGFPATATPESGADKKYSIGLDIGTNSVGWAVITDEYKVPSKKFKVLGNTDRHSIKKNLIGALLFDSGETAEATRLKRTARRRYTRRKNRICYLQEIFSNEMAKVDDSFFHRLEESFLVEEDKKHERHPIFGNIVDEVAYHEKYPTIYHLRKKLVDSTDKADLRLIYLALAHMIKFRGHFLIEGDLNPDNSDVDKLFIQLVQTYNQLFEENPINASGVDAKAILSARLSKSRRLENLIAQLPGEKKNGLFGNLIALSLGLTPNFKSNFDLAEDAKLQLSKDTYDDDLDNLLAQIGDQYADLFLAAKNLSDAILLSDILRVNTEITKAPLSASMIKRYDEHHQDLTLLKALVRQQLPEKYKEIFFDQSKNGYAGYIDGGASQEEFYKFIKPILEKMDGTEELLVKLNREDLLRKQRTFDNGSIPHQIHLGELHAILRRQEDFYPFLKDNREKIEKILTFRIPYYVGPLARGNSRFAWMTRKSEETITPWNFEEVVDKGASAQSFIERMTNFDKNLPNEKVLPKHSLLYEYFTVYNELTKVKYVTEGMRKPAFLSGEQKKAIVDLLFKTNRKVTVKQLKEDYFKKIECFDSVEISGVEDRFNASLGTYHDLLKIIKDKDFLDNEENEDILEDIVLTLTLFEDREMIEERLKTYAHLFDDKVMKQLKRRRYTGWGRLSRKLINGIRDKQSGKTILDFLKSDGFANRNFMQLIHDDSLTFKEDIQKAQVSGQGDSLHEHIANLAGSPAIKKGILQTVKVVDELVKVMGRHKPENIVIEMARENQTTQKGQKNSRERMKRIEEGIKELGSQILKEHPVENTQLQNEKLYLYYLQNGRDMYVDQELDINRLSDYDVDHIVPQSFLKDDSIDNKVLTRSDKNRGKSDNVPSEEVVKKMKNYWRQLLNAKLITQRKFDNLTKAERGGLSELDKAGFIKRQLVETRQITKHVAQILDSRMNTKYDENDKLIREVKVITLKSKLVSDFRKDFQFYKVREINNYHHAHDAYLNAVVGTALIKKYPKLESEFVYGDYKVYDVRKMIAKSEQEIGKATAKYFFYSNIMNFFKTEITLANGEIRKRPLIETNGETGEIVWDKGRDFATVRKVLSMPQVNIVKKTEVQTGGFSKESILPKRNSDKLIARKKDWDPKKYGGFDSPTVAYSVLVVAKVEKGKSKKLKSVKELLGITIMERSSFEKNPIDFLEAKGYKEVKKDLIIKLPKYSLFELENGRKRMLASAGELQKGNELALPSKYVNFLYLASHYEKLKGSPEDNEQKQLFVEQHKHYLDEIIEQISEFSKRVILADANLDKVLSAYNKHRDKPIREQAENIIHLFTLTNLGAPAAFKYFDTTIDRKRYTSTKEVLDATLIHQSITGLYETRIDLSQLGGDAPKKKRKVGIHGVPAAAGDMRAANLWPSPLMIKRSKKNSLALSLTADQMVSALLDAEPPILYSEYDPTRPFSEASMMGLLTNLADRELVHMINWAKRVPGFVDLTLHDQVHLLECAWLEILMIGLVWRSMEHPVKLLFAPNLLLDRNQGKCVEGMVEIFDMLLATSSRFRMMNLQGEEFVCLKSIILLNSGVYTFLSSTLKSLEEKDHIHRVLDKITDTLIHLMAKAGLTLQQQHQRLAQLLLILSHIRHMSNKGMEHLYSMKCKNVVPLYDLLLEAADAHRLHAPTSRGGASVEETDQSHLATAGSTSSHSLQKYYITGEAEGFPATAPAGAGDMRAANLWPSPLMIKRSKKNSLALSLTADQMVSALLDAEPPILYSEYDPTRPFSEASMMGLLTNLADRELVHMINWAKRVPGFVDLTLHDQVHLLECAWLEILMIGLVWRSMEHPVKLLFAPNLLLDRNQGKCVEGMVEIFDMLLATSSRFRMMNLQGEEFVCLKSIILLNSGVYTFLSSTLKSLEEKDHIHRVLDKITDTLIHLMAKAGLTLQQQHQRLAQLLLILSHIRHMSNKGMEHLYSMKCKNVVPLYDLLLEAADAHRLHAPTSRGGASVEETDQSHLATAGSTSSHSLQKYYITGEAEGFPATA

SEQ ID NO: 323 - protein, 2665 aa, Artificial Sequence
  #Cas9 variant 29
SRADPKKKRKVTGAGDMRAANLWPSPLMIKRSKKNSLALSLTADQMVSALLDAEPPILYSEYDPTRPFSEASMMGLLTNLADRELVHMINWAKRVPGFVDLTLHDQVHLLECAWLEILMIGLVWRSMEHPVKLLFAPNLLLDRNQGKCVEGMVEIFDMLLATSSRFRMMNLQGEEFVCLKSIILLNSGVYTFLSSTLKSLEEKDHIHRVLDKITDTLIHLMAKAGLTLQQQHQRLAQLLLILSHIRHMSNKGMEHLYSMKCKNVVPLYDLLLEAADAHRLHAPTSRGGASVEETDQSHLATAGSTSSHSLQKYYITGEAEGFPATAGGSPRGGSAGDMRAANLWPSPLMIKRSKKNSLALSLTADQMVSALLDAEPPILYSEYDPTRPFSEASMMGLLTNLADRELVHMINWAKRVPGFVDLTLHDQVHLLECAWLEILMIGLVWRSMEHPVKLLFAPNLLLDRNQGKCVEGMVEIFDMLLATSSRFRMMNLQGEEFVCLKSIILLNSGVYTFLSSTLKSLEEKDHIHRVLDKITDTLIHLMAKAGLTLQQQHQRLAQLLLILSHIRHMSNKGMEHLYSMKCKNVVPLYDLLLEAADAHRLHAPTSRGGASVEETDQSHLATAGSTSSHSLQKYYITGEAEGFPATATPESGADKKYSIGLDIGTNSVGWAVITDEYKVPSKKFKVLGNTDRHSIKKNLIGALLFDSGETAEATRLKRTARRRYTRRKNRICYLQEIFSNEMAKVDDSFFHRLEESFLVEEDKKHERHPIFGNIVDEVAYHEKYPTIYHLRKKLVDSTDKADLRLIYLALAHMIKFRGHFLIEGDLNPDNSDVDKLFIQLVQTYNQLFEENPINASGVDAKAILSARLSKSRRLENLIAQLPGEKKNGLFGNLIALSLGLTPNFKSNFDLAEDAKLQLSKDTYDDDLDNLLAQIGDQYADLFLAAKNLSDAILLSDILRVNTEITKAPLSASMIKRYDEHHQDLTLLKALVRQQLPEKYKEIFFDQSKNGYAGYIDGGASQEEFYKFIKPILEKMDGTEELLVKLNREDLLRKQRTFDNGSIPHQIHLGELHAILRRQEDFYPFLKDNREKIEKILTFRIPYYVGPLARGNSRFAWMTRKSEETITPWNFEEVVDKGASAQSFIERMTNFDKNLPNEKVLPKHSLLYEYFTVYNELTKVKYVTEGMRKPAFLSGEQKKAIVDLLFKTNRKVTVKQLKEDYFKKIECFDSVEISGVEDRFNASLGTYHDLLKIIKDKDFLDNEENEDILEDIVLTLTLFEDREMIEERLKTYAHLFDDKVMKQLKRRRYTGWGRLSRKLINGIRDKQSGKTILDFLKSDGFANRNFMQLIHDDSLTFKEDIQKAQVSGQGDSLHEHIANLAGSPAIKKGILQTVKVVDELVKVMGRHKPENIVIEMARENQTTQKGQKNSRERMKRIEEGIKELGSQILKEHPVENTQLQNEKLYLYYLQNGRDMYVDQELDINRLSDYDVDHIVPQSFLKDDSIDNKVLTRSDKNRGKSDNVPSEEVVKKMKNYWRQLLNAKLITQRKFDNLTKAERGGLSELDKAGFIKRQLVETRQITKHVAQILDSRMNTKYDENDKLIREVKVITLKSKLVSDFRKDFQFYKVREINNYHHAHDAYLNAVVGTALIKKYPKLESEFVYGDYKVYDVRKMIAKSEQEIGKATAKYFFYSNIMNFFKTEITLANGEIRKRPLIETNGETGEIVWDKGRDFATVRKVLSMPQVNIVKKTEVQTGGFSKESILPKRNSDKLIARKKDWDPKKYGGFDSPTVAYSVLVVAKVEKGKSKKLKSVKELLGITIMERSSFEKNPIDFLEAKGYKEVKKDLIIKLPKYSLFELENGRKRMLASAGELQKGNELALPSKYVNFLYLASHYEKLKGSPEDNEQKQLFVEQHKHYLDEIIEQISEFSKRVILADANLDKVLSAYNKHRDKPIREQAENIIHLFTLTNLGAPAAFKYFDTTIDRKRYTSTKEVLDATLIHQSITGLYETRIDLSQLGGDAPKKKRKVGIHGVPAAAGDMRAANLWPSPLMIKRSKKNSLALSLTADQMVSALLDAEPPILYSEYDPTRPFSEASMMGLLTNLADRELVHMINWAKRVPGFVDLTLHDQVHLLECAWLEILMIGLVWRSMEHPVKLLFAPNLLLDRNQGKCVEGMVEIFDMLLATSSRFRMMNLQGEEFVCLKSIILLNSGVYTFLSSTLKSLEEKDHIHRVLDKITDTLIHLMAKAGLTLQQQHQRLAQLLLILSHIRHMSNKGMEHLYSMKCKNVVPLYDLLLEAADAHRLHAPTSRGGASVEETDQSHLATAGSTSSHSLQKYYITGEAEGFPATAPAGAGDMRAANLWPSPLMIKRSKKNSLALSLTADQMVSALLDAEPPILYSEYDPTRPFSEASMMGLLTNLADRELVHMINWAKRVPGFVDLTLHDQVHLLECAWLEILMIGLVWRSMEHPVKLLFAPNLLLDRNQGKCVEGMVEIFDMLLATSSRFRMMNLQGEEFVCLKSIILLNSGVYTFLSSTLKSLEEKDHIHRVLDKITDTLIHLMAKAGLTLQQQHQRLAQLLLILSHIRHMSNKGMEHLYSMKCKNVVPLYDLLLEAADAHRLHAPTSRGGASVEETDQSHLATAGSTSSHSLQKYYITGEAEGFPATA

SEQ ID NO: 324 - protein, 2668 aa, Artificial Sequence
  #Cas9 variant 30
SRADPKKKRKVTGGGSAGDMRAANLWPSPLMIKRSKKNSLALSLTADQMVSALLDAEPPILYSEYDPTRPFSEASMMGLLTNLADRELVHMINWAKRVPGFVDLTLHDQVHLLECAWLEILMIGLVWRSMEHPVKLLFAPNLLLDRNQGKCVEGMVEIFDMLLATSSRFRMMNLQGEEFVCLKSIILLNSGVYTFLSSTLKSLEEKDHIHRVLDKITDTLIHLMAKAGLTLQQQHQRLAQLLLILSHIRHMSNKGMEHLYSMKCKNVVPLYDLLLEAADAHRLHAPTSRGGASVEETDQSHLATAGSTSSHSLQKYYITGEAEGFPATAPRGGSAGDMRAANLWPSPLMIKRSKKNSLALSLTADQMVSALLDAEPPILYSEYDPTRPFSEASMMGLLTNLADRELVHMINWAKRVPGFVDLTLHDQVHLLECAWLEILMIGLVWRSMEHPVKLLFAPNLLLDRNQGKCVEGMVEIFDMLLATSSRFRMMNLQGEEFVCLKSIILLNSGVYTFLSSTLKSLEEKDHIHRVLDKITDTLIHLMAKAGLTLQQQHQRLAQLLLILSHIRHMSNKGMEHLYSMKCKNVVPLYDLLLEAADAHRLHAPTSRGGASVEETDQSHLATAGSTSSHSLQKYYITGEAEGFPATATPESGADKKYSIGLDIGTNSVGWAVITDEYKVPSKKFKVLGNTDRHSIKKNLIGALLFDSGETAEATRLKRTARRRYTRRKNRICYLQEIFSNEMAKVDDSFFHRLEESFLVEEDKKHERHPIFGNIVDEVAYHEKYPTIYHLRKKLVDSTDKADLRLIYLALAHMIKFRGHFLIEGDLNPDNSDVDKLFIQLVQTYNQLFEENPINASGVDAKAILSARLSKSRRLENLIAQLPGEKKNGLFGNLIALSLGLTPNFKSNFDLAEDAKLQLSKDTYDDDLDNLLAQIGDQYADLFLAAKNLSDAILLSDILRVNTEITKAPLSASMIKRYDEHHQDLTLLKALVRQQLPEKYKEIFFDQSKNGYAGYIDGGASQEEFYKFIKPILEKMDGTEELLVKLNREDLLRKQRTFDNGSIPHQIHLGELHAILRRQEDFYPFLKDNREKIEKILTFRIPYYVGPLARGNSRFAWMTRKSEETITPWNFEEVVDKGASAQSFIERMTNFDKNLPNEKVLPKHSLLYEYFTVYNELTKVKYVTEGMRKPAFLSGEQKKAIVDLLFKTNRKVTVKQLKEDYFKKIECFDSVEISGVEDRFNASLGTYHDLLKIIKDKDFLDNEENEDILEDIVLTLTLFEDREMIEERLKTYAHLFDDKVMKQLKRRRYTGWGRLSRKLINGIRDKQSGKTILDFLKSDGFANRNFMQLIHDDSLTFKEDIQKAQVSGQGDSLHEHIANLAGSPAIKKGILQTVKVVDELVKVMGRHKPENIVIEMARENQTTQKGQKNSRERMKRIEEGIKELGSQILKEHPVENTQLQNEKLYLYYLQNGRDMYVDQELDINRLSDYDVDHIVPQSFLKDDSIDNKVLTRSDKNRGKSDNVPSEEVVKKMKNYWRQLLNAKLITQRKFDNLTKAERGGLSELDKAGFIKRQLVETRQITKHVAQILDSRMNTKYDENDKLIREVKVITLKSKLVSDFRKDFQFYKVREINNYHHAHDAYLNAVVGTALIKKYPKLESEFVYGDYKVYDVRKMIAKSEQEIGKATAKYFFYSNIMNFFKTEITLANGEIRKRPLIETNGETGEIVWDKGRDFATVRKVLSMPQVNIVKKTEVQTGGFSKESILPKRNSDKLIARKKDWDPKKYGGFDSPTVAYSVLVVAKVEKGKSKKLKSVKELLGITIMERSSFEKNPIDFLEAKGYKEVKKDLIIKLPKYSLFELENGRKRMLASAGELQKGNELALPSKYVNFLYLASHYEKLKGSPEDNEQKQLFVEQHKHYLDEIIEQISEFSKRVILADANLDKVLSAYNKHRDKPIREQAENIIHLFTLTNLGAPAAFKYFDTTIDRKRYTSTKEVLDATLIHQSITGLYETRIDLSQLGGDAPKKKRKVGIHGVPAAAGDMRAANLWPSPLMIKRSKKNSLALSLTADQMVSALLDAEPPILYSEYDPTRPFSEASMMGLLTNLADRELVHMINWAKRVPGFVDLTLHDQVHLLECAWLEILMIGLVWRSMEHPVKLLFAPNLLLDRNQGKCVEGMVEIFDMLLATSSRFRMMNLQGEEFVCLKSIILLNSGVYTFLSSTLKSLEEKDHIHRVLDKITDTLIHLMAKAGLTLQQQHQRLAQLLLILSHIRHMSNKGMEHLYSMKCKNVVPLYDLLLEAADAHRLHAPTSRGGASVEETDQSHLATAGSTSSHSLQKYYITGEAEGFPATAPAGGGSAGDMRAANLWPSPLMIKRSKKNSLALSLTADQMVSALLDAEPPILYSEYDPTRPFSEASMMGLLTNLADRELVHMINWAKRVPGFVDLTLHDQVHLLECAWLEILMIGLVWRSMEHPVKLLFAPNLLLDRNQGKCVEGMVEIFDMLLATSSRFRMMNLQGEEFVCLKSIILLNSGVYTFLSSTLKSLEEKDHIHRVLDKITDTLIHLMAKAGLTLQQQHQRLAQLLLILSHIRHMSNKGMEHLYSMKCKNVVPLYDLLLEAADAHRLHAPTSRGGASVEETDQSHLATAGSTSSHSLQKYYITGEAEGFPATA

SEQ ID NO: 325 - protein, 2031 aa, Artificial Sequence
  #Cas9 variant 1
SRADPKKKRKVTGAGDMRAANLWPSPLMIKRSKKNSLALSLTADQMVSALLDAEPPILYSEYDPTRPFSEASMMGLLTNLADRELVHMINWAKRVPGFVDLTLHDQVHLLECAWLEILMIGLVWRSMEHPVKLLFAPNLLLDRNQGKCVEGMVEIFDMLLATSSRFRMMNLQGEEFVCLKSIILLNSGVYTFLSSTLKSLEEKDHIHRVLDKITDTLIHLMAKAGLTLQQQHQRLAQLLLILSHIRHMSNKGMEHLYSMKCKNVVPLYDLLLEAADAHRLHAPTSRGGASVEETDQSHLATAGSTSSHSLQKYYITGEAEGFPATASGSETPGTSESAGADKKYSIGLDIGTNSVGWAVITDEYKVPSKKFKVLGNTDRHSIKKNLIGALLFDSGETAEATRLKRTARRRYTRRKNRICYLQEIFSNEMAKVDDSFFHRLEESFLVEEDKKHERHPIFGNIVDEVAYHEKYPTIYHLRKKLVDSTDKADLRLIYLALAHMIKFRGHFLIEGDLNPDNSDVDKLFIQLVQTYNQLFEENPINASGVDAKAILSARLSKSRRLENLIAQLPGEKKNGLFGNLIALSLGLTPNFKSNFDLAEDAKLQLSKDTYDDDLDNLLAQIGDQYADLFLAAKNLSDAILLSDILRVNTEITKAPLSASMIKRYDEHHQDLTLLKALVRQQLPEKYKEIFFDQSKNGYAGYIDGGASQEEFYKFIKPILEKMDGTEELLVKLNREDLLRKQRTFDNGSIPHQIHLGELHAILRRQEDFYPFLKDNREKIEKILTFRIPYYVGPLARGNSRFAWMTRKSEETITPWNFEEVVDKGASAQSFIERMTNFDKNLPNEKVLPKHSLLYEYFTVYNELTKVKYVTEGMRKPAFLSGEQKKAIVDLLFKTNRKVTVKQLKEDYFKKIECFDSVEISGVEDRFNASLGTYHDLLKIIKDKDFLDNEENEDILEDIVLTLTLFEDREMIEERLKTYAHLFDDKVMKQLKRRRYTGWGRLSRKLINGIRDKQSGKTILDFLKSDGFANRNFMQLIHDDSLTFKEDIQKAQVSGQGDSLHEHIANLAGSPAIKKGILQTVKVVDELVKVMGRHKPENIVIEMARENQTTQKGQKNSRERMKRIEEGIKELGSQILKEHPVENTQLQNEKLYLYYLQNGRDMYVDQELDINRLSDYDVDHIVPQSFLKDDSIDNKVLTRSDKNRGKSDNVPSEEVVKKMKNYWRQLLNAKLITQRKFDNLTKAERGGLSELDKAGFIKRQLVETRQITKHVAQILDSRMNTKYDENDKLIREVKVITLKSKLVSDFRKDFQFYKVREINNYHHAHDAYLNAVVGTALIKKYPKLESEFVYGDYKVYDVRKMIAKSEQEIGKATAKYFFYSNIMNFFKTEITLANGEIRKRPLIETNGETGEIVWDKGRDFATVRKVLSMPQVNIVKKTEVQTGGFSKESILPKRNSDKLIARKKDWDPKKYGGFDSPTVAYSVLVVAKVEKGKSKKLKSVKELLGITIMERSSFEKNPIDFLEAKGYKEVKKDLIIKLPKYSLFELENGRKRMLASAGELQKGNELALPSKYVNFLYLASHYEKLKGSPEDNEQKQLFVEQHKHYLDEIIEQISEFSKRVILADANLDKVLSAYNKHRDKPIREQAENIIHLFTLTNLGAPAAFKYFDTTIDRKRYTSTKEVLDATLIHQSITGLYETRIDLSQLGGDSRADPKKKRKVAGDMRAANLWPSPLMIKRSKKNSLALSLTADQMVSALLDAEPPILYSEYDPTRPFSEASMMGLLTNLADRELVHMINWAKRVPGFVDLTLHDQVHLLECAWLEILMIGLVWRSMEHPVKLLFAPNLLLDRNQGKCVEGMVEIFDMLLATSSRFRMMNLQGEEFVCLKSIILLNSGVYTFLSSTLKSLEEKDHIHRVLDKITDTLIHLMAKAGLTLQQQHQRLAQLLLILSHIRHMSNKGMEHLYSMKCKNVVPLYDLLLEAADAHRLHAPTSRGGASVEETDQSHLATAGSTSSHSLQKYYITGEAEGFPATA

SEQ ID NO: 326 - protein, 2023 aa, Artificial Sequence
  #Cas9 variant 2
SRADPKKKRKVTGAGDMRAANLWPSPLMIKRSKKNSLALSLTADQMVSALLDAEPPILYSEYDPTRPFSEASMMGLLTNLADRELVHMINWAKRVPGFVDLTLHDQVHLLECAWLEILMIGLVWRSMEHPVKLLFAPNLLLDRNQGKCVEGMVEIFDMLLATSSRFRMMNLQGEEFVCLKSIILLNSGVYTFLSSTLKSLEEKDHIHRVLDKITDTLIHLMAKAGLTLQQQHQRLAQLLLILSHIRHMSNKGMEHLYSMKCKNVVPLYDLLLEAADAHRLHAPTSRGGASVEETDQSHLATAGSTSSHSLQKYYITGEAEGFPATASGSEGADKKYSIGLDIGTNSVGWAVITDEYKVPSKKFKVLGNTDRHSIKKNLIGALLFDSGETAEATRLKRTARRRYTRRKNRICYLQEIFSNEMAKVDDSFFHRLEESFLVEEDKKHERHPIFGNIVDEVAYHEKYPTIYHLRKKLVDSTDKADLRLIYLALAHMIKFRGHFLIEGDLNPDNSDVDKLFIQLVQTYNQLFEENPINASGVDAKAILSARLSKSRRLENLIAQLPGEKKNGLFGNLIALSLGLTPNFKSNFDLAEDAKLQLSKDTYDDDLDNLLAQIGDQYADLFLAAKNLSDAILLSDILRVNTEITKAPLSASMIKRYDEHHQDLTLLKALVRQQLPEKYKEIFFDQSKNGYAGYIDGGASQEEFYKFIKPILEKMDGTEELLVKLNREDLLRKQRTFDNGSIPHQIHLGELHAILRRQEDFYPFLKDNREKIEKILTFRIPYYVGPLARGNSRFAWMTRKSEETITPWNFEEVVDKGASAQSFIERMTNFDKNLPNEKVLPKHSLLYEYFTVYNELTKVKYVTEGMRKPAFLSGEQKKAIVDLLFKTNRKVTVKQLKEDYFKKIECFDSVEISGVEDRFNASLGTYHDLLKIIKDKDFLDNEENEDILEDIVLTLTLFEDREMIEERLKTYAHLFDDKVMKQLKRRRYTGWGRLSRKLINGIRDKQSGKTILDFLKSDGFANRNFMQLIHDDSLTFKEDIQKAQVSGQGDSLHEHIANLAGSPAIKKGILQTVKVVDELVKVMGRHKPENIVIEMARENQTTQKGQKNSRERMKRIEEGIKELGSQILKEHPVENTQLQNEKLYLYYLQNGRDMYVDQELDINRLSDYDVDHIVPQSFLKDDSIDNKVLTRSDKNRGKSDNVPSEEVVKKMKNYWRQLLNAKLITQRKFDNLTKAERGGLSELDKAGFIKRQLVETRQITKHVAQILDSRMNTKYDENDKLIREVKVITLKSKLVSDFRKDFQFYKVREINNYHHAHDAYLNAVVGTALIKKYPKLESEFVYGDYKVYDVRKMIAKSEQEIGKATAKYFFYSNIMNFFKTEITLANGEIRKRPLIETNGETGEIVWDKGRDFATVRKVLSMPQVNIVKKTEVQTGGFSKESILPKRNSDKLIARKKDWDPKKYGGFDSPTVAYSVLVVAKVEKGKSKKLKSVKELLGITIMERSSFEKNPIDFLEAKGYKEVKKDLIIKLPKYSLFELENGRKRMLASAGELQKGNELALPSKYVNFLYLASHYEKLKGSPEDNEQKQLFVEQHKHYLDEIIEQISEFSKRVILADANLDKVLSAYNKHRDKPIREQAENIIHLFTLTNLGAPAAFKYFDTTIDRKRYTSTKEVLDATLIHQSITGLYETRIDLSQLGGDSRADPKKKRKVAGDMRAANLWPSPLMIKRSKKNSLALSLTADQMVSALLDAEPPILYSEYDPTRPFSEASMMGLLTNLADRELVHMINWAKRVPGFVDLTLHDQVHLLECAWLEILMIGLVWRSMEHPVKLLFAPNLLLDRNQGKCVEGMVEIFDMLLATSSRFRMMNLQGEEFVCLKSIILLNSGVYTFLSSTLKSLEEKDHIHRVLDKITDTLIHLMAKAGLTLQQQHQRLAQLLLILSHIRHMSNKGMEHLYSMKCKNVVPLYDLLLEAADAHRLHAPTSRGGASVEETDQSHLATAGSTSSHSLQKYYITGEAEGFPATA

SEQ ID NO: 327 - protein, 2025 aa, Artificial Sequence
  #Cas9 variant 3
SRADPKKKRKVTGAGDMRAANLWPSPLMIKRSKKNSLALSLTADQMVSALLDAEPPILYSEYDPTRPFSEASMMGLLTNLADRELVHMINWAKRVPGFVDLTLHDQVHLLECAWLEILMIGLVWRSMEHPVKLLFAPNLLLDRNQGKCVEGMVEIFDMLLATSSRFRMMNLQGEEFVCLKSIILLNSGVYTFLSSTLKSLEEKDHIHRVLDKITDTLIHLMAKAGLTLQQQHQRLAQLLLILSHIRHMSNKGMEHLYSMKCKNVVPLYDLLLEAADAHRLHAPTSRGGASVEETDQSHLATAGSTSSHSLQKYYITGEAEGFPATAGGSGGSGADKKYSIGLDIGTNSVGWAVITDEYKVPSKKFKVLGNTDRHSIKKNLIGALLFDSGETAEATRLKRTARRRYTRRKNRICYLQEIFSNEMAKVDDSFFHRLEESFLVEEDKKHERHPIFGNIVDEVAYHEKYPTIYHLRKKLVDSTDKADLRLIYLALAHMIKFRGHFLIEGDLNPDNSDVDKLFIQLVQTYNQLFEENPINASGVDAKAILSARLSKSRRLENLIAQLPGEKKNGLFGNLIALSLGLTPNFKSNFDLAEDAKLQLSKDTYDDDLDNLLAQIGDQYADLFLAAKNLSDAILLSDILRVNTEITKAPLSASMIKRYDEHHQDLTLLKALVRQQLPEKYKEIFFDQSKNGYAGYIDGGASQEEFYKFIKPILEKMDGTEELLVKLNREDLLRKQRTFDNGSIPHQIHLGELHAILRRQEDFYPFLKDNREKIEKILTFRIPYYVGPLARGNSRFAWMTRKSEETITPWNFEEVVDKGASAQSFIERMTNFDKNLPNEKVLPKHSLLYEYFTVYNELTKVKYVTEGMRKPAFLSGEQKKAIVDLLFKTNRKVTVKQLKEDYFKKIECFDSVEISGVEDRFNASLGTYHDLLKIIKDKDFLDNEENEDILEDIVLTLTLFEDREMIEERLKTYAHLFDDKVMKQLKRRRYTGWGRLSRKLINGIRDKQSGKTILDFLKSDGFANRNFMQLIHDDSLTFKEDIQKAQVSGQGDSLHEHIANLAGSPAIKKGILQTVKVVDELVKVMGRHKPENIVIEMARENQTTQKGQKNSRERMKRIEEGIKELGSQILKEHPVENTQLQNEKLYLYYLQNGRDMYVDQELDINRLSDYDVDHIVPQSFLKDDSIDNKVLTRSDKNRGKSDNVPSEEVVKKMKNYWRQLLNAKLITQRKFDNLTKAERGGLSELDKAGFIKRQLVETRQITKHVAQILDSRMNTKYDENDKLIREVKVITLKSKLVSDFRKDFQFYKVREINNYHHAHDAYLNAVVGTALIKKYPKLESEFVYGDYKVYDVRKMIAKSEQEIGKATAKYFFYSNIMNFFKTEITLANGEIRKRPLIETNGETGEIVWDKGRDFATVRKVLSMPQVNIVKKTEVQTGGFSKESILPKRNSDKLIARKKDWDPKKYGGFDSPTVAYSVLVVAKVEKGKSKKLKSVKELLGITIMERSSFEKNPIDFLEAKGYKEVKKDLIIKLPKYSLFELENGRKRMLASAGELQKGNELALPSKYVNFLYLASHYEKLKGSPEDNEQKQLFVEQHKHYLDEIIEQISEFSKRVILADANLDKVLSAYNKHRDKPIREQAENIIHLFTLTNLGAPAAFKYFDTTIDRKRYTSTKEVLDATLIHQSITGLYETRIDLSQLGGDSRADPKKKRKVAGDMRAANLWPSPLMIKRSKKNSLALSLTADQMVSALLDAEPPILYSEYDPTRPFSEASMMGLLTNLADRELVHMINWAKRVPGFVDLTLHDQVHLLECAWLEILMIGLVWRSMEHPVKLLFAPNLLLDRNQGKCVEGMVEIFDMLLATSSRFRMMNLQGEEFVCLKSIILLNSGVYTFLSSTLKSLEEKDHIHRVLDKITDTLIHLMAKAGLTLQQQHQRLAQLLLILSHIRHMSNKGMEHLYSMKCKNVVPLYDLLLEAADAHRLHAPTSRGGASVEETDQSHLATAGSTSSHSLQKYYITGEAEGFPATA

SEQ ID NO: 328 - protein, 2030 aa, Artificial Sequence
  #Cas9 variant 4
SRADPKKKRKVTGAGDMRAANLWPSPLMIKRSKKNSLALSLTADQMVSALLDAEPPILYSEYDPTRPFSEASMMGLLTNLADRELVHMINWAKRVPGFVDLTLHDQVHLLECAWLEILMIGLVWRSMEHPVKLLFAPNLLLDRNQGKCVEGMVEIFDMLLATSSRFRMMNLQGEEFVCLKSIILLNSGVYTFLSSTLKSLEEKDHIHRVLDKITDTLIHLMAKAGLTLQQQHQRLAQLLLILSHIRHMSNKGMEHLYSMKCKNVVPLYDLLLEAADAHRLHAPTSRGGASVEETDQSHLATAGSTSSHSLQKYYITGEAEGFPATAGTSESATPESGGADKKYSIGLDIGTNSVGWAVITDEYKVPSKKFKVLGNTDRHSIKKNLIGALLFDSGETAEATRLKRTARRRYTRRKNRICYLQEIFSNEMAKVDDSFFHRLEESFLVEEDKKHERHPIFGNIVDEVAYHEKYPTIYHLRKKLVDSTDKADLRLIYLALAHMIKFRGHFLIEGDLNPDNSDVDKLFIQLVQTYNQLFEENPINASGVDAKAILSARLSKSRRLENLIAQLPGEKKNGLFGNLIALSLGLTPNFKSNFDLAEDAKLQLSKDTYDDDLDNLLAQIGDQYADLFLAAKNLSDAILLSDILRVNTEITKAPLSASMIKRYDEHHQDLTLLKALVRQQLPEKYKEIFFDQSKNGYAGYIDGGASQEEFYKFIKPILEKMDGTEELLVKLNREDLLRKQRTFDNGSIPHQIHLGELHAILRRQEDFYPFLKDNREKIEKILTFRIPYYVGPLARGNSRFAWMTRKSEETITPWNFEEVVDKGASAQSFIERMTNFDKNLPNEKVLPKHSLLYEYFTVYNELTKVKYVTEGMRKPAFLSGEQKKAIVDLLFKTNRKVTVKQLKEDYFKKIECFDSVEISGVEDRFNASLGTYHDLLKIIKDKDFLDNEENEDILEDIVLTLTLFEDREMIEERLKTYAHLFDDKVMKQLKRRRYTGWGRLSRKLINGIRDKQSGKTILDFLKSDGFANRNFMQLIHDDSLTFKEDIQKAQVSGQGDSLHEHIANLAGSPAIKKGILQTVKVVDELVKVMGRHKPENIVIEMARENQTTQKGQKNSRERMKRIEEGIKELGSQILKEHPVENTQLQNEKLYLYYLQNGRDMYVDQELDINRLSDYDVDHIVPQSFLKDDSIDNKVLTRSDKNRGKSDNVPSEEVVKKMKNYWRQLLNAKLITQRKFDNLTKAERGGLSELDKAGFIKRQLVETRQITKHVAQILDSRMNTKYDENDKLIREVKVITLKSKLVSDFRKDFQFYKVREINNYHHAHDAYLNAVVGTALIKKYPKLESEFVYGDYKVYDVRKMIAKSEQEIGKATAKYFFYSNIMNFFKTEITLANGEIRKRPLIETNGETGEIVWDKGRDFATVRKVLSMPQVNIVKKTEVQTGGFSKESILPKRNSDKLIARKKDWDPKKYGGFDSPTVAYSVLVVAKVEKGKSKKLKSVKELLGITIMERSSFEKNPIDFLEAKGYKEVKKDLIIKLPKYSLFELENGRKRMLASAGELQKGNELALPSKYVNFLYLASHYEKLKGSPEDNEQKQLFVEQHKHYLDEIIEQISEFSKRVILADANLDKVLSAYNKHRDKPIREQAENIIHLFTLTNLGAPAAFKYFDTTIDRKRYTSTKEVLDATLIHQSITGLYETRIDLSQLGGDSRADPKKKRKVAGDMRAANLWPSPLMIKRSKKNSLALSLTADQMVSALLDAEPPILYSEYDPTRPFSEASMMGLLTNLADRELVHMINWAKRVPGFVDLTLHDQVHLLECAWLEILMIGLVWRSMEHPVKLLFAPNLLLDRNQGKCVEGMVEIFDMLLATSSRFRMMNLQGEEFVCLKSIILLNSGVYTFLSSTLKSLEEKDHIHRVLDKITDTLIHLMAKAGLTLQQQHQRLAQLLLILSHIRHMSNKGMEHLYSMKCKNVVPLYDLLLEAADAHRLHAPTSRGGASVEETDQSHLATAGSTSSHSLQKYYITGEAEGFPATA

SEQ ID NO: 329 - protein, 2027 aa, Artificial Sequence
  #Cas9 variant 5
SRADPKKKRKVTGAGDMRAANLWPSPLMIKRSKKNSLALSLTADQMVSALLDAEPPILYSEYDPTRPFSEASMMGLLTNLADRELVHMINWAKRVPGFVDLTLHDQVHLLECAWLEILMIGLVWRSMEHPVKLLFAPNLLLDRNQGKCVEGMVEIFDMLLATSSRFRMMNLQGEEFVCLKSIILLNSGVYTFLSSTLKSLEEKDHIHRVLDKITDTLIHLMAKAGLTLQQQHQRLAQLLLILSHIRHMSNKGMEHLYSMKCKNVVPLYDLLLEAADAHRLHAPTSRGGASVEETDQSHLATAGSTSSHSLQKYYITGEAEGFPATASGSETPGTGADKKYSIGLDIGTNSVGWAVITDEYKVPSKKFKVLGNTDRHSIKKNLIGALLFDSGETAEATRLKRTARRRYTRRKNRICYLQEIFSNEMAKVDDSFFHRLEESFLVEEDKKHERHPIFGNIVDEVAYHEKYPTIYHLRKKLVDSTDKADLRLIYLALAHMIKFRGHFLIEGDLNPDNSDVDKLFIQLVQTYNQLFEENPINASGVDAKAILSARLSKSRRLENLIAQLPGEKKNGLFGNLIALSLGLTPNFKSNFDLAEDAKLQLSKDTYDDDLDNLLAQIGDQYADLFLAAKNLSDAILLSDILRVNTEITKAPLSASMIKRYDEHHQDLTLLKALVRQQLPEKYKEIFFDQSKNGYAGYIDGGASQEEFYKFIKPILEKMDGTEELLVKLNREDLLRKQRTFDNGSIPHQIHLGELHAILRRQEDFYPFLKDNREKIEKILTFRIPYYVGPLARGNSRFAWMTRKSEETITPWNFEEVVDKGASAQSFIERMTNFDKNLPNEKVLPKHSLLYEYFTVYNELTKVKYVTEGMRKPAFLSGEQKKAIVDLLFKTNRKVTVKQLKEDYFKKIECFDSVEISGVEDRFNASLGTYHDLLKIIKDKDFLDNEENEDILEDIVLTLTLFEDREMIEERLKTYAHLFDDKVMKQLKRRRYTGWGRLSRKLINGIRDKQSGKTILDFLKSDGFANRNFMQLIHDDSLTFKEDIQKAQVSGQGDSLHEHIANLAGSPAIKKGILQTVKVVDELVKVMGRHKPENIVIEMARENQTTQKGQKNSRERMKRIEEGIKELGSQILKEHPVENTQLQNEKLYLYYLQNGRDMYVDQELDINRLSDYDVDHIVPQSFLKDDSIDNKVLTRSDKNRGKSDNVPSEEVVKKMKNYWRQLLNAKLITQRKFDNLTKAERGGLSELDKAGFIKRQLVETRQITKHVAQILDSRMNTKYDENDKLIREVKVITLKSKLVSDFRKDFQFYKVREINNYHHAHDAYLNAVVGTALIKKYPKLESEFVYGDYKVYDVRKMIAKSEQEIGKATAKYFFYSNIMNFFKTEITLANGEIRKRPLIETNGETGEIVWDKGRDFATVRKVLSMPQVNIVKKTEVQTGGFSKESILPKRNSDKLIARKKDWDPKKYGGFDSPTVAYSVLVVAKVEKGKSKKLKSVKELLGITIMERSSFEKNPIDFLEAKGYKEVKKDLIIKLPKYSLFELENGRKRMLASAGELQKGNELALPSKYVNFLYLASHYEKLKGSPEDNEQKQLFVEQHKHYLDEIIEQISEFSKRVILADANLDKVLSAYNKHRDKPIREQAENIIHLFTLTNLGAPAAFKYFDTTIDRKRYTSTKEVLDATLIHQSITGLYETRIDLSQLGGDSRADPKKKRKVAGDMRAANLWPSPLMIKRSKKNSLALSLTADQMVSALLDAEPPILYSEYDPTRPFSEASMMGLLTNLADRELVHMINWAKRVPGFVDLTLHDQVHLLECAWLEILMIGLVWRSMEHPVKLLFAPNLLLDRNQGKCVEGMVEIFDMLLATSSRFRMMNLQGEEFVCLKSIILLNSGVYTFLSSTLKSLEEKDHIHRVLDKITDTLIHLMAKAGLTLQQQHQRLAQLLLILSHIRHMSNKGMEHLYSMKCKNVVPLYDLLLEAADAHRLHAPTSRGGASVEETDQSHLATAGSTSSHSLQKYYITGEAEGFPATA

SEQ ID NO: 330 - protein, 2027 aa, Artificial Sequence
  #Cas9 variant 6
SRADPKKKRKVTGAGDMRAANLWPSPLMIKRSKKNSLALSLTADQMVSALLDAEPPILYSEYDPTRPFSEASMMGLLTNLADRELVHMINWAKRVPGFVDLTLHDQVHLLECAWLEILMIGLVWRSMEHPVKLLFAPNLLLDRNQGKCVEGMVEIFDMLLATSSRFRMMNLQGEEFVCLKSIILLNSGVYTFLSSTLKSLEEKDHIHRVLDKITDTLIHLMAKAGLTLQQQHQRLAQLLLILSHIRHMSNKGMEHLYSMKCKNVVPLYDLLLEAADAHRLHAPTSRGGASVEETDQSHLATAGSTSSHSLQKYYITGEAEGFPATASESATPESGADKKYSIGLDIGTNSVGWAVITDEYKVPSKKFKVLGNTDRHSIKKNLIGALLFDSGETAEATRLKRTARRRYTRRKNRICYLQEIFSNEMAKVDDSFFHRLEESFLVEEDKKHERHPIFGNIVDEVAYHEKYPTIYHLRKKLVDSTDKADLRLIYLALAHMIKFRGHFLIEGDLNPDNSDVDKLFIQLVQTYNQLFEENPINASGVDAKAILSARLSKSRRLENLIAQLPGEKKNGLFGNLIALSLGLTPNFKSNFDLAEDAKLQLSKDTYDDDLDNLLAQIGDQYADLFLAAKNLSDAILLSDILRVNTEITKAPLSASMIKRYDEHHQDLTLLKALVRQQLPEKYKEIFFDQSKNGYAGYIDGGASQEEFYKFIKPILEKMDGTEELLVKLNREDLLRKQRTFDNGSIPHQIHLGELHAILRRQEDFYPFLKDNREKIEKILTFRIPYYVGPLARGNSRFAWMTRKSEETITPWNFEEVVDKGASAQSFIERMTNFDKNLPNEKVLPKHSLLYEYFTVYNELTKVKYVTEGMRKPAFLSGEQKKAIVDLLFKTNRKVTVKQLKEDYFKKIECFDSVEISGVEDRFNASLGTYHDLLKIIKDKDFLDNEENEDILEDIVLTLTLFEDREMIEERLKTYAHLFDDKVMKQLKRRRYTGWGRLSRKLINGIRDKQSGKTILDFLKSDGFANRNFMQLIHDDSLTFKEDIQKAQVSGQGDSLHEHIANLAGSPAIKKGILQTVKVVDELVKVMGRHKPENIVIEMARENQTTQKGQKNSRERMKRIEEGIKELGSQILKEHPVENTQLQNEKLYLYYLQNGRDMYVDQELDINRLSDYDVDHIVPQSFLKDDSIDNKVLTRSDKNRGKSDNVPSEEVVKKMKNYWRQLLNAKLITQRKFDNLTKAERGGLSELDKAGFIKRQLVETRQITKHVAQILDSRMNTKYDENDKLIREVKVITLKSKLVSDFRKDFQFYKVREINNYHHAHDAYLNAVVGTALIKKYPKLESEFVYGDYKVYDVRKMIAKSEQEIGKATAKYFFYSNIMNFFKTEITLANGEIRKRPLIETNGETGEIVWDKGRDFATVRKVLSMPQVNIVKKTEVQTGGFSKESILPKRNSDKLIARKKDWDPKKYGGFDSPTVAYSVLVVAKVEKGKSKKLKSVKELLGITIMERSSFEKNPIDFLEAKGYKEVKKDLIIKLPKYSLFELENGRKRMLASAGELQKGNELALPSKYVNFLYLASHYEKLKGSPEDNEQKQLFVEQHKHYLDEIIEQISEFSKRVILADANLDKVLSAYNKHRDKPIREQAENIIHLFTLTNLGAPAAFKYFDTTIDRKRYTSTKEVLDATLIHQSITGLYETRIDLSQLGGDSRADPKKKRKVAGDMRAANLWPSPLMIKRSKKNSLALSLTADQMVSALLDAEPPILYSEYDPTRPFSEASMMGLLTNLADRELVHMINWAKRVPGFVDLTLHDQVHLLECAWLEILMIGLVWRSMEHPVKLLFAPNLLLDRNQGKCVEGMVEIFDMLLATSSRFRMMNLQGEEFVCLKSIILLNSGVYTFLSSTLKSLEEKDHIHRVLDKITDTLIHLMAKAGLTLQQQHQRLAQLLLILSHIRHMSNKGMEHLYSMKCKNVVPLYDLLLEAADAHRLHAPTSRGGASVEETDQSHLATAGSTSSHSLQKYYITGEAEGFPATA

SEQ ID NO: 331 - protein, 2030 aa, Artificial Sequence
  #Cas9 variant 7
SRADPKKKRKVTGGGSAGDMRAANLWPSPLMIKRSKKNSLALSLTADQMVSALLDAEPPILYSEYDPTRPFSEASMMGLLTNLADRELVHMINWAKRVPGFVDLTLHDQVHLLECAWLEILMIGLVWRSMEHPVKLLFAPNLLLDRNQGKCVEGMVEIFDMLLATSSRFRMMNLQGEEFVCLKSIILLNSGVYTFLSSTLKSLEEKDHIHRVLDKITDTLIHLMAKAGLTLQQQHQRLAQLLLILSHIRHMSNKGMEHLYSMKCKNVVPLYDLLLEAADAHRLHAPTSRGGASVEETDQSHLATAGSTSSHSLQKYYITGEAEGFPATASGSETPGTGADKKYSIGLDIGTNSVGWAVITDEYKVPSKKFKVLGNTDRHSIKKNLIGALLFDSGETAEATRLKRTARRRYTRRKNRICYLQEIFSNEMAKVDDSFFHRLEESFLVEEDKKHERHPIFGNIVDEVAYHEKYPTIYHLRKKLVDSTDKADLRLIYLALAHMIKFRGHFLIEGDLNPDNSDVDKLFIQLVQTYNQLFEENPINASGVDAKAILSARLSKSRRLENLIAQLPGEKKNGLFGNLIALSLGLTPNFKSNFDLAEDAKLQLSKDTYDDDLDNLLAQIGDQYADLFLAAKNLSDAILLSDILRVNTEITKAPLSASMIKRYDEHHQDLTLLKALVRQQLPEKYKEIFFDQSKNGYAGYIDGGASQEEFYKFIKPILEKMDGTEELLVKLNREDLLRKQRTFDNGSIPHQIHLGELHAILRRQEDFYPFLKDNREKIEKILTFRIPYYVGPLARGNSRFAWMTRKSEETITPWNFEEVVDKGASAQSFIERMTNFDKNLPNEKVLPKHSLLYEYFTVYNELTKVKYVTEGMRKPAFLSGEQKKAIVDLLFKTNRKVTVKQLKEDYFKKIECFDSVEISGVEDRFNASLGTYHDLLKIIKDKDFLDNEENEDILEDIVLTLTLFEDREMIEERLKTYAHLFDDKVMKQLKRRRYTGWGRLSRKLINGIRDKQSGKTILDFLKSDGFANRNFMQLIHDDSLTFKEDIQKAQVSGQGDSLHEHIANLAGSPAIKKGILQTVKVVDELVKVMGRHKPENIVIEMARENQTTQKGQKNSRERMKRIEEGIKELGSQILKEHPVENTQLQNEKLYLYYLQNGRDMYVDQELDINRLSDYDVDHIVPQSFLKDDSIDNKVLTRSDKNRGKSDNVPSEEVVKKMKNYWRQLLNAKLITQRKFDNLTKAERGGLSELDKAGFIKRQLVETRQITKHVAQILDSRMNTKYDENDKLIREVKVITLKSKLVSDFRKDFQFYKVREINNYHHAHDAYLNAVVGTALIKKYPKLESEFVYGDYKVYDVRKMIAKSEQEIGKATAKYFFYSNIMNFFKTEITLANGEIRKRPLIETNGETGEIVWDKGRDFATVRKVLSMPQVNIVKKTEVQTGGFSKESILPKRNSDKLIARKKDWDPKKYGGFDSPTVAYSVLVVAKVEKGKSKKLKSVKELLGITIMERSSFEKNPIDFLEAKGYKEVKKDLIIKLPKYSLFELENGRKRMLASAGELQKGNELALPSKYVNFLYLASHYEKLKGSPEDNEQKQLFVEQHKHYLDEIIEQISEFSKRVILADANLDKVLSAYNKHRDKPIREQAENIIHLFTLTNLGAPAAFKYFDTTIDRKRYTSTKEVLDATLIHQSITGLYETRIDLSQLGGDSRADPKKKRKVAGDMRAANLWPSPLMIKRSKKNSLALSLTADQMVSALLDAEPPILYSEYDPTRPFSEASMMGLLTNLADRELVHMINWAKRVPGFVDLTLHDQVHLLECAWLEILMIGLVWRSMEHPVKLLFAPNLLLDRNQGKCVEGMVEIFDMLLATSSRFRMMNLQGEEFVCLKSIILLNSGVYTFLSSTLKSLEEKDHIHRVLDKITDTLIHLMAKAGLTLQQQHQRLAQLLLILSHIRHMSNKGMEHLYSMKCKNVVPLYDLLLEAADAHRLHAPTSRGGASVEETDQSHLATAGSTSSHSLQKYYITGEAEGFPATA

SEQ ID NO: 332 - protein, 2032 aa, Artificial Sequence
  #Cas9 variant 8
SRADPKKKRKVTGGGSAGDMRAANLWPSPLMIKRSKKNSLALSLTADQMVSALLDAEPPILYSEYDPTRPFSEASMMGLLTNLADRELVHMINWAKRVPGFVDLTLHDQVHLLECAWLEILMIGLVWRSMEHPVKLLFAPNLLLDRNQGKCVEGMVEIFDMLLATSSRFRMMNLQGEEFVCLKSIILLNSGVYTFLSSTLKSLEEKDHIHRVLDKITDTLIHLMAKAGLTLQQQHQRLAQLLLILSHIRHMSNKGMEHLYSMKCKNVVPLYDLLLEAADAHRLHAPTSRGGASVEETDQSHLATAGSTSSHSLQKYYITGEAEGFPATASGSETPGTPGGADKKYSIGLDIGTNSVGWAVITDEYKVPSKKFKVLGNTDRHSIKKNLIGALLFDSGETAEATRLKRTARRRYTRRKNRICYLQEIFSNEMAKVDDSFFHRLEESFLVEEDKKHERHPIFGNIVDEVAYHEKYPTIYHLRKKLVDSTDKADLRLIYLALAHMIKFRGHFLIEGDLNPDNSDVDKLFIQLVQTYNQLFEENPINASGVDAKAILSARLSKSRRLENLIAQLPGEKKNGLFGNLIALSLGLTPNFKSNFDLAEDAKLQLSKDTYDDDLDNLLAQIGDQYADLFLAAKNLSDAILLSDILRVNTEITKAPLSASMIKRYDEHHQDLTLLKALVRQQLPEKYKEIFFDQSKNGYAGYIDGGASQEEFYKFIKPILEKMDGTEELLVKLNREDLLRKQRTFDNGSIPHQIHLGELHAILRRQEDFYPFLKDNREKIEKILTFRIPYYVGPLARGNSRFAWMTRKSEETITPWNFEEVVDKGASAQSFIERMTNFDKNLPNEKVLPKHSLLYEYFTVYNELTKVKYVTEGMRKPAFLSGEQKKAIVDLLFKTNRKVTVKQLKEDYFKKIECFDSVEISGVEDRFNASLGTYHDLLKIIKDKDFLDNEENEDILEDIVLTLTLFEDREMIEERLKTYAHLFDDKVMKQLKRRRYTGWGRLSRKLINGIRDKQSGKTILDFLKSDGFANRNFMQLIHDDSLTFKEDIQKAQVSGQGDSLHEHIANLAGSPAIKKGILQTVKVVDELVKVMGRHKPENIVIEMARENQTTQKGQKNSRERMKRIEEGIKELGSQILKEHPVENTQLQNEKLYLYYLQNGRDMYVDQELDINRLSDYDVDHIVPQSFLKDDSIDNKVLTRSDKNRGKSDNVPSEEVVKKMKNYWRQLLNAKLITQRKFDNLTKAERGGLSELDKAGFIKRQLVETRQITKHVAQILDSRMNTKYDENDKLIREVKVITLKSKLVSDFRKDFQFYKVREINNYHHAHDAYLNAVVGTALIKKYPKLESEFVYGDYKVYDVRKMIAKSEQEIGKATAKYFFYSNIMNFFKTEITLANGEIRKRPLIETNGETGEIVWDKGRDFATVRKVLSMPQVNIVKKTEVQTGGFSKESILPKRNSDKLIARKKDWDPKKYGGFDSPTVAYSVLVVAKVEKGKSKKLKSVKELLGITIMERSSFEKNPIDFLEAKGYKEVKKDLIIKLPKYSLFELENGRKRMLASAGELQKGNELALPSKYVNFLYLASHYEKLKGSPEDNEQKQLFVEQHKHYLDEIIEQISEFSKRVILADANLDKVLSAYNKHRDKPIREQAENIIHLFTLTNLGAPAAFKYFDTTIDRKRYTSTKEVLDATLIHQSITGLYETRIDLSQLGGDSRADPKKKRKVAGDMRAANLWPSPLMIKRSKKNSLALSLTADQMVSALLDAEPPILYSEYDPTRPFSEASMMGLLTNLADRELVHMINWAKRVPGFVDLTLHDQVHLLECAWLEILMIGLVWRSMEHPVKLLFAPNLLLDRNQGKCVEGMVEIFDMLLATSSRFRMMNLQGEEFVCLKSIILLNSGVYTFLSSTLKSLEEKDHIHRVLDKITDTLIHLMAKAGLTLQQQHQRLAQLLLILSHIRHMSNKGMEHLYSMKCKNVVPLYDLLLEAADAHRLHAPTSRGGASVEETDQSHLATAGSTSSHSLQKYYITGEAEGFPATA

SEQ ID NO: 333 - protein, 2026 aa, Artificial Sequence
  #Cas9 variant 9
SRADPKKKRKVTGAGDMRAANLWPSPLMIKRSKKNSLALSLTADQMVSALLDAEPPILYSEYDPTRPFSEASMMGLLTNLADRELVHMINWAKRVPGFVDLTLHDQVHLLECAWLEILMIGLVWRSMEHPVKLLFAPNLLLDRNQGKCVEGMVEIFDMLLATSSRFRMMNLQGEEFVCLKSIILLNSGVYTFLSSTLKSLEEKDHIHRVLDKITDTLIHLMAKAGLTLQQQHQRLAQLLLILSHIRHMSNKGMEHLYSMKCKNVVPLYDLLLEAADAHRLHAPTSRGGASVEETDQSHLATAGSTSSHSLQKYYITGEAEGFPATAGASGSKTPGDKKYSIGLDIGTNSVGWAVITDEYKVPSKKFKVLGNTDRHSIKKNLIGALLFDSGETAEATRLKRTARRRYTRRKNRICYLQEIFSNEMAKVDDSFFHRLEESFLVEEDKKHERHPIFGNIVDEVAYHEKYPTIYHLRKKLVDSTDKADLRLIYLALAHMIKFRGHFLIEGDLNPDNSDVDKLFIQLVQTYNQLFEENPINASGVDAKAILSARLSKSRRLENLIAQLPGEKKNGLFGNLIALSLGLTPNFKSNFDLAEDAKLQLSKDTYDDDLDNLLAQIGDQYADLFLAAKNLSDAILLSDILRVNTEITKAPLSASMIKRYDEHHQDLTLLKALVRQQLPEKYKEIFFDQSKNGYAGYIDGGASQEEFYKFIKPILEKMDGTEELLVKLNREDLLRKQRTFDNGSIPHQIHLGELHAILRRQEDFYPFLKDNREKIEKILTFRIPYYVGPLARGNSRFAWMTRKSEETITPWNFEEVVDKGASAQSFIERMTNFDKNLPNEKVLPKHSLLYEYFTVYNELTKVKYVTEGMRKPAFLSGEQKKAIVDLLFKTNRKVTVKQLKEDYFKKIECFDSVEISGVEDRFNASLGTYHDLLKIIKDKDFLDNEENEDILEDIVLTLTLFEDREMIEERLKTYAHLFDDKVMKQLKRRRYTGWGRLSRKLINGIRDKQSGKTILDFLKSDGFANRNFMQLIHDDSLTFKEDIQKAQVSGQGDSLHEHIANLAGSPAIKKGILQTVKVVDELVKVMGRHKPENIVIEMARENQTTQKGQKNSRERMKRIEEGIKELGSQILKEHPVENTQLQNEKLYLYYLQNGRDMYVDQELDINRLSDYDVDHIVPQSFLKDDSIDNKVLTRSDKNRGKSDNVPSEEVVKKMKNYWRQLLNAKLITQRKFDNLTKAERGGLSELDKAGFIKRQLVETRQITKHVAQILDSRMNTKYDENDKLIREVKVITLKSKLVSDFRKDFQFYKVREINNYHHAHDAYLNAVVGTALIKKYPKLESEFVYGDYKVYDVRKMIAKSEQEIGKATAKYFFYSNIMNFFKTEITLANGEIRKRPLIETNGETGEIVWDKGRDFATVRKVLSMPQVNIVKKTEVQTGGFSKESILPKRNSDKLIARKKDWDPKKYGGFDSPTVAYSVLVVAKVEKGKSKKLKSVKELLGITIMERSSFEKNPIDFLEAKGYKEVKKDLIIKLPKYSLFELENGRKRMLASAGELQKGNELALPSKYVNFLYLASHYEKLKGSPEDNEQKQLFVEQHKHYLDEIIEQISEFSKRVILADANLDKVLSAYNKHRDKPIREQAENIIHLFTLTNLGAPAAFKYFDTTIDRKRYTSTKEVLDATLIHQSITGLYETRIDLSQLGGDSRADPKKKRKVAGDMRAANLWPSPLMIKRSKKNSLALSLTADQMVSALLDAEPPILYSEYDPTRPFSEASMMGLLTNLADRELVHMINWAKRVPGFVDLTLHDQVHLLECAWLEILMIGLVWRSMEHPVKLLFAPNLLLDRNQGKCVEGMVEIFDMLLATSSRFRMMNLQGEEFVCLKSIILLNSGVYTFLSSTLKSLEEKDHIHRVLDKITDTLIHLMAKAGLTLQQQHQRLAQLLLILSHIRHMSNKGMEHLYSMKCKNVVPLYDLLLEAADAHRLHAPTSRGGASVEETDQSHLATAGSTSSHSLQKYYITGEAEGFPATA

SEQ ID NO: 334 - protein, 2023 aa, Artificial Sequence
  #Cas9 variant 10
SRADPKKKRKVTGAGDMRAANLWPSPLMIKRSKKNSLALSLTADQMVSALLDAEPPILYSEYDPTRPFSEASMMGLLTNLADRELVHMINWAKRVPGFVDLTLHDQVHLLECAWLEILMIGLVWRSMEHPVKLLFAPNLLLDRNQGKCVEGMVEIFDMLLATSSRFRMMNLQGEEFVCLKSIILLNSGVYTFLSSTLKSLEEKDHIHRVLDKITDTLIHLMAKAGLTLQQQHQRLAQLLLILSHIRHMSNKGMEHLYSMKCKNVVPLYDLLLEAADAHRLHAPTSRGGASVEETDQSHLATAGSTSSHSLQKYYITGEAEGFPATATPESGADKKYSIGLDIGTNSVGWAVITDEYKVPSKKFKVLGNTDRHSIKKNLIGALLFDSGETAEATRLKRTARRRYTRRKNRICYLQEIFSNEMAKVDDSFFHRLEESFLVEEDKKHERHPIFGNIVDEVAYHEKYPTIYHLRKKLVDSTDKADLRLIYLALAHMIKFRGHFLIEGDLNPDNSDVDKLFIQLVQTYNQLFEENPINASGVDAKAILSARLSKSRRLENLIAQLPGEKKNGLFGNLIALSLGLTPNFKSNFDLAEDAKLQLSKDTYDDDLDNLLAQIGDQYADLFLAAKNLSDAILLSDILRVNTEITKAPLSASMIKRYDEHHQDLTLLKALVRQQLPEKYKEIFFDQSKNGYAGYIDGGASQEEFYKFIKPILEKMDGTEELLVKLNREDLLRKQRTFDNGSIPHQIHLGELHAILRRQEDFYPFLKDNREKIEKILTFRIPYYVGPLARGNSRFAWMTRKSEETITPWNFEEVVDKGASAQSFIERMTNFDKNLPNEKVLPKHSLLYEYFTVYNELTKVKYVTEGMRKPAFLSGEQKKAIVDLLFKTNRKVTVKQLKEDYFKKIECFDSVEISGVEDRFNASLGTYHDLLKIIKDKDFLDNEENEDILEDIVLTLTLFEDREMIEERLKTYAHLFDDKVMKQLKRRRYTGWGRLSRKLINGIRDKQSGKTILDFLKSDGFANRNFMQLIHDDSLTFKEDIQKAQVSGQGDSLHEHIANLAGSPAIKKGILQTVKVVDELVKVMGRHKPENIVIEMARENQTTQKGQKNSRERMKRIEEGIKELGSQILKEHPVENTQLQNEKLYLYYLQNGRDMYVDQELDINRLSDYDVDHIVPQSFLKDDSIDNKVLTRSDKNRGKSDNVPSEEVVKKMKNYWRQLLNAKLITQRKFDNLTKAERGGLSELDKAGFIKRQLVETRQITKHVAQILDSRMNTKYDENDKLIREVKVITLKSKLVSDFRKDFQFYKVREINNYHHAHDAYLNAVVGTALIKKYPKLESEFVYGDYKVYDVRKMIAKSEQEIGKATAKYFFYSNIMNFFKTEITLANGEIRKRPLIETNGETGEIVWDKGRDFATVRKVLSMPQVNIVKKTEVQTGGFSKESILPKRNSDKLIARKKDWDPKKYGGFDSPTVAYSVLVVAKVEKGKSKKLKSVKELLGITIMERSSFEKNPIDFLEAKGYKEVKKDLIIKLPKYSLFELENGRKRMLASAGELQKGNELALPSKYVNFLYLASHYEKLKGSPEDNEQKQLFVEQHKHYLDEIIEQISEFSKRVILADANLDKVLSAYNKHRDKPIREQAENIIHLFTLTNLGAPAAFKYFDTTIDRKRYTSTKEVLDATLIHQSITGLYETRIDLSQLGGDSRADPKKKRKVAGDMRAANLWPSPLMIKRSKKNSLALSLTADQMVSALLDAEPPILYSEYDPTRPFSEASMMGLLTNLADRELVHMINWAKRVPGFVDLTLHDQVHLLECAWLEILMIGLVWRSMEHPVKLLFAPNLLLDRNQGKCVEGMVEIFDMLLATSSRFRMMNLQGEEFVCLKSIILLNSGVYTFLSSTLKSLEEKDHIHRVLDKITDTLIHLMAKAGLTLQQQHQRLAQLLLILSHIRHMSNKGMEHLYSMKCKNVVPLYDLLLEAADAHRLHAPTSRGGASVEETDQSHLATAGSTSSHSLQKYYITGEAEGFPATA

SEQ ID NO: 335 - protein, 2023 aa, Artificial Sequence
  #Cas9 variant 11
SRADPKKKRKVTGPGGSAGDMRAANLWPSPLMIKRSKKNSLALSLTADQMVSALLDAEPPILYSEYDPTRPFSEASMMGLLTNLADRELVHMINWAKRVPGFVDLTLHDQVHLLECAWLEILMIGLVWRSMEHPVKLLFAPNLLLDRNQGKCVEGMVEIFDMLLATSSRFRMMNLQGEEFVCLKSIILLNSGVYTFLSSTLKSLEEKDHIHRVLDKITDTLIHLMAKAGLTLQQQHQRLAQLLLILSHIRHMSNKGMEHLYSMKCKNVVPLYDLLLEAADAHRLHAPTSRGGASVEETDQSHLATAGSTSSHSLQKYYITGEAEGFPATAGADKKYSIGLDIGTNSVGWAVITDEYKVPSKKFKVLGNTDRHSIKKNLIGALLFDSGETAEATRLKRTARRRYTRRKNRICYLQEIFSNEMAKVDDSFFHRLEESFLVEEDKKHERHPIFGNIVDEVAYHEKYPTIYHLRKKLVDSTDKADLRLIYLALAHMIKFRGHFLIEGDLNPDNSDVDKLFIQLVQTYNQLFEENPINASGVDAKAILSARLSKSRRLENLIAQLPGEKKNGLFGNLIALSLGLTPNFKSNFDLAEDAKLQLSKDTYDDDLDNLLAQIGDQYADLFLAAKNLSDAILLSDILRVNTEITKAPLSASMIKRYDEHHQDLTLLKALVRQQLPEKYKEIFFDQSKNGYAGYIDGGASQEEFYKFIKPILEKMDGTEELLVKLNREDLLRKQRTFDNGSIPHQIHLGELHAILRRQEDFYPFLKDNREKIEKILTFRIPYYVGPLARGNSRFAWMTRKSEETITPWNFEEVVDKGASAQSFIERMTNFDKNLPNEKVLPKHSLLYEYFTVYNELTKVKYVTEGMRKPAFLSGEQKKAIVDLLFKTNRKVTVKQLKEDYFKKIECFDSVEISGVEDRFNASLGTYHDLLKIIKDKDFLDNEENEDILEDIVLTLTLFEDREMIEERLKTYAHLFDDKVMKQLKRRRYTGWGRLSRKLINGIRDKQSGKTILDFLKSDGFANRNFMQLIHDDSLTFKEDIQKAQVSGQGDSLHEHIANLAGSPAIKKGILQTVKVVDELVKVMGRHKPENIVIEMARENQTTQKGQKNSRERMKRIEEGIKELGSQILKEHPVENTQLQNEKLYLYYLQNGRDMYVDQELDINRLSDYDVDHIVPQSFLKDDSIDNKVLTRSDKNRGKSDNVPSEEVVKKMKNYWRQLLNAKLITQRKFDNLTKAERGGLSELDKAGFIKRQLVETRQITKHVAQILDSRMNTKYDENDKLIREVKVITLKSKLVSDFRKDFQFYKVREINNYHHAHDAYLNAVVGTALIKKYPKLESEFVYGDYKVYDVRKMIAKSEQEIGKATAKYFFYSNIMNFFKTEITLANGEIRKRPLIETNGETGEIVWDKGRDFATVRKVLSMPQVNIVKKTEVQTGGFSKESILPKRNSDKLIARKKDWDPKKYGGFDSPTVAYSVLVVAKVEKGKSKKLKSVKELLGITIMERSSFEKNPIDFLEAKGYKEVKKDLIIKLPKYSLFELENGRKRMLASAGELQKGNELALPSKYVNFLYLASHYEKLKGSPEDNEQKQLFVEQHKHYLDEIIEQISEFSKRVILADANLDKVLSAYNKHRDKPIREQAENIIHLFTLTNLGAPAAFKYFDTTIDRKRYTSTKEVLDATLIHQSITGLYETRIDLSQLGGDSRADPKKKRKVAGDMRAANLWPSPLMIKRSKKNSLALSLTADQMVSALLDAEPPILYSEYDPTRPFSEASMMGLLTNLADRELVHMINWAKRVPGFVDLTLHDQVHLLECAWLEILMIGLVWRSMEHPVKLLFAPNLLLDRNQGKCVEGMVEIFDMLLATSSRFRMMNLQGEEFVCLKSIILLNSGVYTFLSSTLKSLEEKDHIHRVLDKITDTLIHLMAKAGLTLQQQHQRLAQLLLILSHIRHMSNKGMEHLYSMKCKNVVPLYDLLLEAADAHRLHAPTSRGGASVEETDQSHLATAGSTSSHSLQKYYITGEAEGFPATA

SEQ ID NO: 336 - protein, 2032 aa, Artificial Sequence
  #Cas9 variant 12
SRADPKKKRKVTGGGSAGDMRAANLWPSPLMIKRSKKNSLALSLTADQMVSALLDAEPPILYSEYDPTRPFSEASMMGLLTNLADRELVHMINWAKRVPGFVDLTLHDQVHLLECAWLEILMIGLVWRSMEHPVKLLFAPNLLLDRNQGKCVEGMVEIFDMLLATSSRFRMMNLQGEEFVCLKSIILLNSGVYTFLSSTLKSLEEKDHIHRVLDKITDTLIHLMAKAGLTLQQQHQRLAQLLLILSHIRHMSNKGMEHLYSMKCKNVVPLYDLLLEAADAHRLHAPTSRGGASVEETDQSHLATAGSTSSHSLQKYYITGEAEGFPATASGSETPGTSEGADKKYSIGLDIGTNSVGWAVITDEYKVPSKKFKVLGNTDRHSIKKNLIGALLFDSGETAEATRLKRTARRRYTRRKNRICYLQEIFSNEMAKVDDSFFHRLEESFLVEEDKKHERHPIFGNIVDEVAYHEKYPTIYHLRKKLVDSTDKADLRLIYLALAHMIKFRGHFLIEGDLNPDNSDVDKLFIQLVQTYNQLFEENPINASGVDAKAILSARLSKSRRLENLIAQLPGEKKNGLFGNLIALSLGLTPNFKSNFDLAEDAKLQLSKDTYDDDLDNLLAQIGDQYADLFLAAKNLSDAILLSDILRVNTEITKAPLSASMIKRYDEHHQDLTLLKALVRQQLPEKYKEIFFDQSKNGYAGYIDGGASQEEFYKFIKPILEKMDGTEELLVKLNREDLLRKQRTFDNGSIPHQIHLGELHAILRRQEDFYPFLKDNREKIEKILTFRIPYYVGPLARGNSRFAWMTRKSEETITPWNFEEVVDKGASAQSFIERMTNFDKNLPNEKVLPKHSLLYEYFTVYNELTKVKYVTEGMRKPAFLSGEQKKAIVDLLFKTNRKVTVKQLKEDYFKKIECFDSVEISGVEDRFNASLGTYHDLLKIIKDKDFLDNEENEDILEDIVLTLTLFEDREMIEERLKTYAHLFDDKVMKQLKRRRYTGWGRLSRKLINGIRDKQSGKTILDFLKSDGFANRNFMQLIHDDSLTFKEDIQKAQVSGQGDSLHEHIANLAGSPAIKKGILQTVKVVDELVKVMGRHKPENIVIEMARENQTTQKGQKNSRERMKRIEEGIKELGSQILKEHPVENTQLQNEKLYLYYLQNGRDMYVDQELDINRLSDYDVDHIVPQSFLKDDSIDNKVLTRSDKNRGKSDNVPSEEVVKKMKNYWRQLLNAKLITQRKFDNLTKAERGGLSELDKAGFIKRQLVETRQITKHVAQILDSRMNTKYDENDKLIREVKVITLKSKLVSDFRKDFQFYKVREINNYHHAHDAYLNAVVGTALIKKYPKLESEFVYGDYKVYDVRKMIAKSEQEIGKATAKYFFYSNIMNFFKTEITLANGEIRKRPLIETNGETGEIVWDKGRDFATVRKVLSMPQVNIVKKTEVQTGGFSKESILPKRNSDKLIARKKDWDPKKYGGFDSPTVAYSVLVVAKVEKGKSKKLKSVKELLGITIMERSSFEKNPIDFLEAKGYKEVKKDLIIKLPKYSLFELENGRKRMLASAGELQKGNELALPSKYVNFLYLASHYEKLKGSPEDNEQKQLFVEQHKHYLDEIIEQISEFSKRVILADANLDKVLSAYNKHRDKPIREQAENIIHLFTLTNLGAPAAFKYFDTTIDRKRYTSTKEVLDATLIHQSITGLYETRIDLSQLGGDSRADPKKKRKVAGDMRAANLWPSPLMIKRSKKNSLALSLTADQMVSALLDAEPPILYSEYDPTRPFSEASMMGLLTNLADRELVHMINWAKRVPGFVDLTLHDQVHLLECAWLEILMIGLVWRSMEHPVKLLFAPNLLLDRNQGKCVEGMVEIFDMLLATSSRFRMMNLQGEEFVCLKSIILLNSGVYTFLSSTLKSLEEKDHIHRVLDKITDTLIHLMAKAGLTLQQQHQRLAQLLLILSHIRHMSNKGMEHLYSMKCKNVVPLYDLLLEAADAHRLHAPTSRGGASVEETDQSHLATAGSTSSHSLQKYYITGEAEGFPATA

SEQ ID NO: 337 - protein, 2026 aa, Artificial Sequence
  #Cas9 variant 13
SRADPKKKRKVTGGGSAGDMRAANLWPSPLMIKRSKKNSLALSLTADQMVSALLDAEPPILYSEYDPTRPFSEASMMGLLTNLADRELVHMINWAKRVPGFVDLTLHDQVHLLECAWLEILMIGLVWRSMEHPVKLLFAPNLLLDRNQGKCVEGMVEIFDMLLATSSRFRMMNLQGEEFVCLKSIILLNSGVYTFLSSTLKSLEEKDHIHRVLDKITDTLIHLMAKAGLTLQQQHQRLAQLLLILSHIRHMSNKGMEHLYSMKCKNVVPLYDLLLEAADAHRLHAPTSRGGASVEETDQSHLATAGSTSSHSLQKYYITGEAEGFPATATPESGADKKYSIGLDIGTNSVGWAVITDEYKVPSKKFKVLGNTDRHSIKKNLIGALLFDSGETAEATRLKRTARRRYTRRKNRICYLQEIFSNEMAKVDDSFFHRLEESFLVEEDKKHERHPIFGNIVDEVAYHEKYPTIYHLRKKLVDSTDKADLRLIYLALAHMIKFRGHFLIEGDLNPDNSDVDKLFIQLVQTYNQLFEENPINASGVDAKAILSARLSKSRRLENLIAQLPGEKKNGLFGNLIALSLGLTPNFKSNFDLAEDAKLQLSKDTYDDDLDNLLAQIGDQYADLFLAAKNLSDAILLSDILRVNTEITKAPLSASMIKRYDEHHQDLTLLKALVRQQLPEKYKEIFFDQSKNGYAGYIDGGASQEEFYKFIKPILEKMDGTEELLVKLNREDLLRKQRTFDNGSIPHQIHLGELHAILRRQEDFYPFLKDNREKIEKILTFRIPYYVGPLARGNSRFAWMTRKSEETITPWNFEEVVDKGASAQSFIERMTNFDKNLPNEKVLPKHSLLYEYFTVYNELTKVKYVTEGMRKPAFLSGEQKKAIVDLLFKTNRKVTVKQLKEDYFKKIECFDSVEISGVEDRFNASLGTYHDLLKIIKDKDFLDNEENEDILEDIVLTLTLFEDREMIEERLKTYAHLFDDKVMKQLKRRRYTGWGRLSRKLINGIRDKQSGKTILDFLKSDGFANRNFMQLIHDDSLTFKEDIQKAQVSGQGDSLHEHIANLAGSPAIKKGILQTVKVVDELVKVMGRHKPENIVIEMARENQTTQKGQKNSRERMKRIEEGIKELGSQILKEHPVENTQLQNEKLYLYYLQNGRDMYVDQELDINRLSDYDVDHIVPQSFLKDDSIDNKVLTRSDKNRGKSDNVPSEEVVKKMKNYWRQLLNAKLITQRKFDNLTKAERGGLSELDKAGFIKRQLVETRQITKHVAQILDSRMNTKYDENDKLIREVKVITLKSKLVSDFRKDFQFYKVREINNYHHAHDAYLNAVVGTALIKKYPKLESEFVYGDYKVYDVRKMIAKSEQEIGKATAKYFFYSNIMNFFKTEITLANGEIRKRPLIETNGETGEIVWDKGRDFATVRKVLSMPQVNIVKKTEVQTGGFSKESILPKRNSDKLIARKKDWDPKKYGGFDSPTVAYSVLVVAKVEKGKSKKLKSVKELLGITIMERSSFEKNPIDFLEAKGYKEVKKDLIIKLPKYSLFELENGRKRMLASAGELQKGNELALPSKYVNFLYLASHYEKLKGSPEDNEQKQLFVEQHKHYLDEIIEQISEFSKRVILADANLDKVLSAYNKHRDKPIREQAENIIHLFTLTNLGAPAAFKYFDTTIDRKRYTSTKEVLDATLIHQSITGLYETRIDLSQLGGDSRADPKKKRKVAGDMRAANLWPSPLMIKRSKKNSLALSLTADQMVSALLDAEPPILYSEYDPTRPFSEASMMGLLTNLADRELVHMINWAKRVPGFVDLTLHDQVHLLECAWLEILMIGLVWRSMEHPVKLLFAPNLLLDRNQGKCVEGMVEIFDMLLATSSRFRMMNLQGEEFVCLKSIILLNSGVYTFLSSTLKSLEEKDHIHRVLDKITDTLIHLMAKAGLTLQQQHQRLAQLLLILSHIRHMSNKGMEHLYSMKCKNVVPLYDLLLEAADAHRLHAPTSRGGASVEETDQSHLATAGSTSSHSLQKYYITGEAEGFPATA

SEQ ID NO: 338 - protein, 2033 aa, Artificial Sequence
  #Cas9 variant 14
SRADPKKKRKVTGPGGSAGDTTGPGGSAGDMRAANLWPSPLMIKRSKKNSLALSLTADQMVSALLDAEPPILYSEYDPTRPFSEASMMGLLTNLADRELVHMINWAKRVPGFVDLTLHDQVHLLECAWLEILMIGLVWRSMEHPVKLLFAPNLLLDRNQGKCVEGMVEIFDMLLATSSRFRMMNLQGEEFVCLKSIILLNSGVYTFLSSTLKSLEEKDHIHRVLDKITDTLIHLMAKAGLTLQQQHQRLAQLLLILSHIRHMSNKGMEHLYSMKCKNVVPLYDLLLEAADAHRLHAPTSRGGASVEETDQSHLATAGSTSSHSLQKYYITGEAEGFPATAGADKKYSIGLDIGTNSVGWAVITDEYKVPSKKFKVLGNTDRHSIKKNLIGALLFDSGETAEATRLKRTARRRYTRRKNRICYLQEIFSNEMAKVDDSFFHRLEESFLVEEDKKHERHPIFGNIVDEVAYHEKYPTIYHLRKKLVDSTDKADLRLIYLALAHMIKFRGHFLIEGDLNPDNSDVDKLFIQLVQTYNQLFEENPINASGVDAKAILSARLSKSRRLENLIAQLPGEKKNGLFGNLIALSLGLTPNFKSNFDLAEDAKLQLSKDTYDDDLDNLLAQIGDQYADLFLAAKNLSDAILLSDILRVNTEITKAPLSASMIKRYDEHHQDLTLLKALVRQQLPEKYKEIFFDQSKNGYAGYIDGGASQEEFYKFIKPILEKMDGTEELLVKLNREDLLRKQRTFDNGSIPHQIHLGELHAILRRQEDFYPFLKDNREKIEKILTFRIPYYVGPLARGNSRFAWMTRKSEETITPWNFEEVVDKGASAQSFIERMTNFDKNLPNEKVLPKHSLLYEYFTVYNELTKVKYVTEGMRKPAFLSGEQKKAIVDLLFKTNRKVTVKQLKEDYFKKIECFDSVEISGVEDRFNASLGTYHDLLKIIKDKDFLDNEENEDILEDIVLTLTLFEDREMIEERLKTYAHLFDDKVMKQLKRRRYTGWGRLSRKLINGIRDKQSGKTILDFLKSDGFANRNFMQLIHDDSLTFKEDIQKAQVSGQGDSLHEHIANLAGSPAIKKGILQTVKVVDELVKVMGRHKPENIVIEMARENQTTQKGQKNSRERMKRIEEGIKELGSQILKEHPVENTQLQNEKLYLYYLQNGRDMYVDQELDINRLSDYDVDHIVPQSFLKDDSIDNKVLTRSDKNRGKSDNVPSEEVVKKMKNYWRQLLNAKLITQRKFDNLTKAERGGLSELDKAGFIKRQLVETRQITKHVAQILDSRMNTKYDENDKLIREVKVITLKSKLVSDFRKDFQFYKVREINNYHHAHDAYLNAVVGTALIKKYPKLESEFVYGDYKVYDVRKMIAKSEQEIGKATAKYFFYSNIMNFFKTEITLANGEIRKRPLIETNGETGEIVWDKGRDFATVRKVLSMPQVNIVKKTEVQTGGFSKESILPKRNSDKLIARKKDWDPKKYGGFDSPTVAYSVLVVAKVEKGKSKKLKSVKELLGITIMERSSFEKNPIDFLEAKGYKEVKKDLIIKLPKYSLFELENGRKRMLASAGELQKGNELALPSKYVNFLYLASHYEKLKGSPEDNEQKQLFVEQHKHYLDEIIEQISEFSKRVILADANLDKVLSAYNKHRDKPIREQAENIIHLFTLTNLGAPAAFKYFDTTIDRKRYTSTKEVLDATLIHQSITGLYETRIDLSQLGGDSRADPKKKRKVAGDMRAANLWPSPLMIKRSKKNSLALSLTADQMVSALLDAEPPILYSEYDPTRPFSEASMMGLLTNLADRELVHMINWAKRVPGFVDLTLHDQVHLLECAWLEILMIGLVWRSMEHPVKLLFAPNLLLDRNQGKCVEGMVEIFDMLLATSSRFRMMNLQGEEFVCLKSIILLNSGVYTFLSSTLKSLEEKDHIHRVLDKITDTLIHLMAKAGLTLQQQHQRLAQLLLILSHIRHMSNKGMEHLYSMKCKNVVPLYDLLLEAADAHRLHAPTSRGGASVEETDQSHLATAGSTSSHSLQKYYITGEAEGFPATA

SEQ ID NO: 339 - protein, 2030 aa, Artificial Sequence
  #Cas9 variant 15
SRADPKKKRKVTGGGSAGDMRAANLWPSPLMIKRSKKNSLALSLTADQMVSALLDAEPPILYSEYDPTRPFSEASMMGLLTNLADRELVHMINWAKRVPGFVDLTLHDQVHLLECAWLEILMIGLVWRSMEHPVKLLFAPNLLLDRNQGKCVEGMVEIFDMLLATSSRFRMMNLQGEEFVCLKSIILLNSGVYTFLSSTLKSLEEKDHIHRVLDKITDTLIHLMAKAGLTLQQQHQRLAQLLLILSHIRHMSNKGMEHLYSMKCKNVVPLYDLLLEAADAHRLHAPTSRGGASVEETDQSHLATAGSTSSHSLQKYYITGEAEGFPATASESATPESGADKKYSIGLDIGTNSVGWAVITDEYKVPSKKFKVLGNTDRHSIKKNLIGALLFDSGETAEATRLKRTARRRYTRRKNRICYLQEIFSNEMAKVDDSFFHRLEESFLVEEDKKHERHPIFGNIVDEVAYHEKYPTIYHLRKKLVDSTDKADLRLIYLALAHMIKFRGHFLIEGDLNPDNSDVDKLFIQLVQTYNQLFEENPINASGVDAKAILSARLSKSRRLENLIAQLPGEKKNGLFGNLIALSLGLTPNFKSNFDLAEDAKLQLSKDTYDDDLDNLLAQIGDQYADLFLAAKNLSDAILLSDILRVNTEITKAPLSASMIKRYDEHHQDLTLLKALVRQQLPEKYKEIFFDQSKNGYAGYIDGGASQEEFYKFIKPILEKMDGTEELLVKLNREDLLRKQRTFDNGSIPHQIHLGELHAILRRQEDFYPFLKDNREKIEKILTFRIPYYVGPLARGNSRFAWMTRKSEETITPWNFEEVVDKGASAQSFIERMTNFDKNLPNEKVLPKHSLLYEYFTVYNELTKVKYVTEGMRKPAFLSGEQKKAIVDLLFKTNRKVTVKQLKEDYFKKIECFDSVEISGVEDRFNASLGTYHDLLKIIKDKDFLDNEENEDILEDIVLTLTLFEDREMIEERLKTYAHLFDDKVMKQLKRRRYTGWGRLSRKLINGIRDKQSGKTILDFLKSDGFANRNFMQLIHDDSLTFKEDIQKAQVSGQGDSLHEHIANLAGSPAIKKGILQTVKVVDELVKVMGRHKPENIVIEMARENQTTQKGQKNSRERMKRIEEGIKELGSQILKEHPVENTQLQNEKLYLYYLQNGRDMYVDQELDINRLSDYDVDHIVPQSFLKDDSIDNKVLTRSDKNRGKSDNVPSEEVVKKMKNYWRQLLNAKLITQRKFDNLTKAERGGLSELDKAGFIKRQLVETRQITKHVAQILDSRMNTKYDENDKLIREVKVITLKSKLVSDFRKDFQFYKVREINNYHHAHDAYLNAVVGTALIKKYPKLESEFVYGDYKVYDVRKMIAKSEQEIGKATAKYFFYSNIMNFFKTEITLANGEIRKRPLIETNGETGEIVWDKGRDFATVRKVLSMPQVNIVKKTEVQTGGFSKESILPKRNSDKLIARKKDWDPKKYGGFDSPTVAYSVLVVAKVEKGKSKKLKSVKELLGITIMERSSFEKNPIDFLEAKGYKEVKKDLIIKLPKYSLFELENGRKRMLASAGELQKGNELALPSKYVNFLYLASHYEKLKGSPEDNEQKQLFVEQHKHYLDEIIEQISEFSKRVILADANLDKVLSAYNKHRDKPIREQAENIIHLFTLTNLGAPAAFKYFDTTIDRKRYTSTKEVLDATLIHQSITGLYETRIDLSQLGGDSRADPKKKRKVAGDMRAANLWPSPLMIKRSKKNSLALSLTADQMVSALLDAEPPILYSEYDPTRPFSEASMMGLLTNLADRELVHMINWAKRVPGFVDLTLHDQVHLLECAWLEILMIGLVWRSMEHPVKLLFAPNLLLDRNQGKCVEGMVEIFDMLLATSSRFRMMNLQGEEFVCLKSIILLNSGVYTFLSSTLKSLEEKDHIHRVLDKITDTLIHLMAKAGLTLQQQHQRLAQLLLILSHIRHMSNKGMEHLYSMKCKNVVPLYDLLLEAADAHRLHAPTSRGGASVEETDQSHLATAGSTSSHSLQKYYITGEAEGFPATA

SEQ ID NO: 340 - protein, 2026 aa, Artificial Sequence
  #Cas9 variant 16
SRADPKKKRKVTGGGSAGDMRAANLWPSPLMIKRSKKNSLALSLTADQMVSALLDAEPPILYSEYDPTRPFSEASMMGLLTNLADRELVHMINWAKRVPGFVDLTLHDQVHLLECAWLEILMIGLVWRSMEHPVKLLFAPNLLLDRNQGKCVEGMVEIFDMLLATSSRFRMMNLQGEEFVCLKSIILLNSGVYTFLSSTLKSLEEKDHIHRVLDKITDTLIHLMAKAGLTLQQQHQRLAQLLLILSHIRHMSNKGMEHLYSMKCKNVVPLYDLLLEAADAHRLHAPTSRGGASVEETDQSHLATAGSTSSHSLQKYYITGEAEGFPATASGSEGADKKYSIGLDIGTNSVGWAVITDEYKVPSKKFKVLGNTDRHSIKKNLIGALLFDSGETAEATRLKRTARRRYTRRKNRICYLQEIFSNEMAKVDDSFFHRLEESFLVEEDKKHERHPIFGNIVDEVAYHEKYPTIYHLRKKLVDSTDKADLRLIYLALAHMIKFRGHFLIEGDLNPDNSDVDKLFIQLVQTYNQLFEENPINASGVDAKAILSARLSKSRRLENLIAQLPGEKKNGLFGNLIALSLGLTPNFKSNFDLAEDAKLQLSKDTYDDDLDNLLAQIGDQYADLFLAAKNLSDAILLSDILRVNTEITKAPLSASMIKRYDEHHQDLTLLKALVRQQLPEKYKEIFFDQSKNGYAGYIDGGASQEEFYKFIKPILEKMDGTEELLVKLNREDLLRKQRTFDNGSIPHQIHLGELHAILRRQEDFYPFLKDNREKIEKILTFRIPYYVGPLARGNSRFAWMTRKSEETITPWNFEEVVDKGASAQSFIERMTNFDKNLPNEKVLPKHSLLYEYFTVYNELTKVKYVTEGMRKPAFLSGEQKKAIVDLLFKTNRKVTVKQLKEDYFKKIECFDSVEISGVEDRFNASLGTYHDLLKIIKDKDFLDNEENEDILEDIVLTLTLFEDREMIEERLKTYAHLFDDKVMKQLKRRRYTGWGRLSRKLINGIRDKQSGKTILDFLKSDGFANRNFMQLIHDDSLTFKEDIQKAQVSGQGDSLHEHIANLAGSPAIKKGILQTVKVVDELVKVMGRHKPENIVIEMARENQTTQKGQKNSRERMKRIEEGIKELGSQILKEHPVENTQLQNEKLYLYYLQNGRDMYVDQELDINRLSDYDVDHIVPQSFLKDDSIDNKVLTRSDKNRGKSDNVPSEEVVKKMKNYWRQLLNAKLITQRKFDNLTKAERGGLSELDKAGFIKRQLVETRQITKHVAQILDSRMNTKYDENDKLIREVKVITLKSKLVSDFRKDFQFYKVREINNYHHAHDAYLNAVVGTALIKKYPKLESEFVYGDYKVYDVRKMIAKSEQEIGKATAKYFFYSNIMNFFKTEITLANGEIRKRPLIETNGETGEIVWDKGRDFATVRKVLSMPQVNIVKKTEVQTGGFSKESILPKRNSDKLIARKKDWDPKKYGGFDSPTVAYSVLVVAKVEKGKSKKLKSVKELLGITIMERSSFEKNPIDFLEAKGYKEVKKDLIIKLPKYSLFELENGRKRMLASAGELQKGNELALPSKYVNFLYLASHYEKLKGSPEDNEQKQLFVEQHKHYLDEIIEQISEFSKRVILADANLDKVLSAYNKHRDKPIREQAENIIHLFTLTNLGAPAAFKYFDTTIDRKRYTSTKEVLDATLIHQSITGLYETRIDLSQLGGDSRADPKKKRKVAGDMRAANLWPSPLMIKRSKKNSLALSLTADQMVSALLDAEPPILYSEYDPTRPFSEASMMGLLTNLADRELVHMINWAKRVPGFVDLTLHDQVHLLECAWLEILMIGLVWRSMEHPVKLLFAPNLLLDRNQGKCVEGMVEIFDMLLATSSRFRMMNLQGEEFVCLKSIILLNSGVYTFLSSTLKSLEEKDHIHRVLDKITDTLIHLMAKAGLTLQQQHQRLAQLLLILSHIRHMSNKGMEHLYSMKCKNVVPLYDLLLEAADAHRLHAPTSRGGASVEETDQSHLATAGSTSSHSLQKYYITGEAEGFPATA

SEQ ID NO: 341 - protein, 2019 aa, Artificial Sequence
  #Cas9 variant 17
SRADPKKKRKVTGAGDMRAANLWPSPLMIKRSKKNSLALSLTADQMVSALLDAEPPILYSEYDPTRPFSEASMMGLLTNLADRELVHMINWAKRVPGFVDLTLHDQVHLLECAWLEILMIGLVWRSMEHPVKLLFAPNLLLDRNQGKCVEGMVEIFDMLLATSSRFRMMNLQGEEFVCLKSIILLNSGVYTFLSSTLKSLEEKDHIHRVLDKITDTLIHLMAKAGLTLQQQHQRLAQLLLILSHIRHMSNKGMEHLYSMKCKNVVPLYDLLLEAADAHRLHAPTSRGGASVEETDQSHLATAGSTSSHSLQKYYITGEAEGFPATAPGDKKYSIGLDIGTNSVGWAVITDEYKVPSKKFKVLGNTDRHSIKKNLIGALLFDSGETAEATRLKRTARRRYTRRKNRICYLQEIFSNEMAKVDDSFFHRLEESFLVEEDKKHERHPIFGNIVDEVAYHEKYPTIYHLRKKLVDSTDKADLRLIYLALAHMIKFRGHFLIEGDLNPDNSDVDKLFIQLVQTYNQLFEENPINASGVDAKAILSARLSKSRRLENLIAQLPGEKKNGLFGNLIALSLGLTPNFKSNFDLAEDAKLQLSKDTYDDDLDNLLAQIGDQYADLFLAAKNLSDAILLSDILRVNTEITKAPLSASMIKRYDEHHQDLTLLKALVRQQLPEKYKEIFFDQSKNGYAGYIDGGASQEEFYKFIKPILEKMDGTEELLVKLNREDLLRKQRTFDNGSIPHQIHLGELHAILRRQEDFYPFLKDNREKIEKILTFRIPYYVGPLARGNSRFAWMTRKSEETITPWNFEEVVDKGASAQSFIERMTNFDKNLPNEKVLPKHSLLYEYFTVYNELTKVKYVTEGMRKPAFLSGEQKKAIVDLLFKTNRKVTVKQLKEDYFKKIECFDSVEISGVEDRFNASLGTYHDLLKIIKDKDFLDNEENEDILEDIVLTLTLFEDREMIEERLKTYAHLFDDKVMKQLKRRRYTGWGRLSRKLINGIRDKQSGKTILDFLKSDGFANRNFMQLIHDDSLTFKEDIQKAQVSGQGDSLHEHIANLAGSPAIKKGILQTVKVVDELVKVMGRHKPENIVIEMARENQTTQKGQKNSRERMKRIEEGIKELGSQILKEHPVENTQLQNEKLYLYYLQNGRDMYVDQELDINRLSDYDVDHIVPQSFLKDDSIDNKVLTRSDKNRGKSDNVPSEEVVKKMKNYWRQLLNAKLITQRKFDNLTKAERGGLSELDKAGFIKRQLVETRQITKHVAQILDSRMNTKYDENDKLIREVKVITLKSKLVSDFRKDFQFYKVREINNYHHAHDAYLNAVVGTALIKKYPKLESEFVYGDYKVYDVRKMIAKSEQEIGKATAKYFFYSNIMNFFKTEITLANGEIRKRPLIETNGETGEIVWDKGRDFATVRKVLSMPQVNIVKKTEVQTGGFSKESILPKRNSDKLIARKKDWDPKKYGGFDSPTVAYSVLVVAKVEKGKSKKLKSVKELLGITIMERSSFEKNPIDFLEAKGYKEVKKDLIIKLPKYSLFELENGRKRMLASAGELQKGNELALPSKYVNFLYLASHYEKLKGSPEDNEQKQLFVEQHKHYLDEIIEQISEFSKRVILADANLDKVLSAYNKHRDKPIREQAENIIHLFTLTNLGAPAAFKYFDTTIDRKRYTSTKEVLDATLIHQSITGLYETRIDLSQLGGDSRADPKKKRKVAGDMRAANLWPSPLMIKRSKKNSLALSLTADQMVSALLDAEPPILYSEYDPTRPFSEASMMGLLTNLADRELVHMINWAKRVPGFVDLTLHDQVHLLECAWLEILMIGLVWRSMEHPVKLLFAPNLLLDRNQGKCVEGMVEIFDMLLATSSRFRMMNLQGEEFVCLKSIILLNSGVYTFLSSTLKSLEEKDHIHRVLDKITDTLIHLMAKAGLTLQQQHQRLAQLLLILSHIRHMSNKGMEHLYSMKCKNVVPLYDLLLEAADAHRLHAPTSRGGASVEETDQSHLATAGSTSSHSLQKYYITGEAEGFPATA

SEQ ID NO: 342 - protein, 2022 aa, Artificial Sequence
  #Cas9 variant 18
SRADPKKKRKVTGAGDMRAANLWPSPLMIKRSKKNSLALSLTADQMVSALLDAEPPILYSEYDPTRPFSEASMMGLLTNLADRELVHMINWAKRVPGFVDLTLHDQVHLLECAWLEILMIGLVWRSMEHPVKLLFAPNLLLDRNQGKCVEGMVEIFDMLLATSSRFRMMNLQGEEFVCLKSIILLNSGVYTFLSSTLKSLEEKDHIHRVLDKITDTLIHLMAKAGLTLQQQHQRLAQLLLILSHIRHMSNKGMEHLYSMKCKNVVPLYDLLLEAADAHRLHAPTSRGGASVEETDQSHLATAGSTSSHSLQKYYITGEAEGFPATAGADKKYSIGLDIGTNSVGWAVITDEYKVPSKKFKVLGNTDRHSIKKNLIGALLFDSGETAEATRLKRTARRRYTRRKNRICYLQEIFSNEMAKVDDSFFHRLEESFLVEEDKKHERHPIFGNIVDEVAYHEKYPTIYHLRKKLVDSTDKADLRLIYLALAHMIKFRGHFLIEGDLNPDNSDVDKLFIQLVQTYNQLFEENPINASGVDAKAILSARLSKSRRLENLIAQLPGEKKNGLFGNLIALSLGLTPNFKSNFDLAEDAKLQLSKDTYDDDLDNLLAQIGDQYADLFLAAKNLSDAILLSDILRVNTEITKAPLSASMIKRYDEHHQDLTLLKALVRQQLPEKYKEIFFDQSKNGYAGYIDGGASQEEFYKFIKPILEKMDGTEELLVKLNREDLLRKQRTFDNGSIPHQIHLGELHAILRRQEDFYPFLKDNREKIEKILTFRIPYYVGPLARGNSRFAWMTRKSEETITPWNFEEVVDKGASAQSFIERMTNFDKNLPNEKVLPKHSLLYEYFTVYNELTKVKYVTEGMRKPAFLSGEQKKAIVDLLFKTNRKVTVKQLKEDYFKKIECFDSVEISGVEDRFNASLGTYHDLLKIIKDKDFLDNEENEDILEDIVLTLTLFEDREMIEERLKTYAHLFDDKVMKQLKRRRYTGWGRLSRKLINGIRDKQSGKTILDFLKSDGFANRNFMQLIHDDSLTFKEDIQKAQVSGQGDSLHEHIANLAGSPAIKKGILQTVKVVDELVKVMGRHKPENIVIEMARENQTTQKGQKNSRERMKRIEEGIKELGSQILKEHPVENTQLQNEKLYLYYLQNGRDMYVDQELDINRLSDYDVDHIVPQSFLKDDSIDNKVLTRSDKNRGKSDNVPSEEVVKKMKNYWRQLLNAKLITQRKFDNLTKAERGGLSELDKAGFIKRQLVETRQITKHVAQILDSRMNTKYDENDKLIREVKVITLKSKLVSDFRKDFQFYKVREINNYHHAHDAYLNAVVGTALIKKYPKLESEFVYGDYKVYDVRKMIAKSEQEIGKATAKYFFYSNIMNFFKTEITLANGEIRKRPLIETNGETGEIVWDKGRDFATVRKVLSMPQVNIVKKTEVQTGGFSKESILPKRNSDKLIARKKDWDPKKYGGFDSPTVAYSVLVVAKVEKGKSKKLKSVKELLGITIMERSSFEKNPIDFLEAKGYKEVKKDLIIKLPKYSLFELENGRKRMLASAGELQKGNELALPSKYVNFLYLASHYEKLKGSPEDNEQKQLFVEQHKHYLDEIIEQISEFSKRVILADANLDKVLSAYNKHRDKPIREQAENIIHLFTLTNLGAPAAFKYFDTTIDRKRYTSTKEVLDATLIHQSITGLYETRIDLSQLGGDSRADPKKKRKVSGSAGDMRAANLWPSPLMIKRSKKNSLALSLTADQMVSALLDAEPPILYSEYDPTRPFSEASMMGLLTNLADRELVHMINWAKRVPGFVDLTLHDQVHLLECAWLEILMIGLVWRSMEHPVKLLFAPNLLLDRNQGKCVEGMVEIFDMLLATSSRFRMMNLQGEEFVCLKSIILLNSGVYTFLSSTLKSLEEKDHIHRVLDKITDTLIHLMAKAGLTLQQQHQRLAQLLLILSHIRHMSNKGMEHLYSMKCKNVVPLYDLLLEAADAHRLHAPTSRGGASVEETDQSHLATAGSTSSHSLQKYYITGEAEGFPATA

SEQ ID NO: 343 - protein, 2023 aa, Artificial Sequence
  #Cas9 variant 19
SRADPKKKRKVTGAGDMRAANLWPSPLMIKRSKKNSLALSLTADQMVSALLDAEPPILYSEYDPTRPFSEASMMGLLTNLADRELVHMINWAKRVPGFVDLTLHDQVHLLECAWLEILMIGLVWRSMEHPVKLLFAPNLLLDRNQGKCVEGMVEIFDMLLATSSRFRMMNLQGEEFVCLKSIILLNSGVYTFLSSTLKSLEEKDHIHRVLDKITDTLIHLMAKAGLTLQQQHQRLAQLLLILSHIRHMSNKGMEHLYSMKCKNVVPLYDLLLEAADAHRLHAPTSRGGASVEETDQSHLATAGSTSSHSLQKYYITGEAEGFPATAGADKKYSIGLDIGTNSVGWAVITDEYKVPSKKFKVLGNTDRHSIKKNLIGALLFDSGETAEATRLKRTARRRYTRRKNRICYLQEIFSNEMAKVDDSFFHRLEESFLVEEDKKHERHPIFGNIVDEVAYHEKYPTIYHLRKKLVDSTDKADLRLIYLALAHMIKFRGHFLIEGDLNPDNSDVDKLFIQLVQTYNQLFEENPINASGVDAKAILSARLSKSRRLENLIAQLPGEKKNGLFGNLIALSLGLTPNFKSNFDLAEDAKLQLSKDTYDDDLDNLLAQIGDQYADLFLAAKNLSDAILLSDILRVNTEITKAPLSASMIKRYDEHHQDLTLLKALVRQQLPEKYKEIFFDQSKNGYAGYIDGGASQEEFYKFIKPILEKMDGTEELLVKLNREDLLRKQRTFDNGSIPHQIHLGELHAILRRQEDFYPFLKDNREKIEKILTFRIPYYVGPLARGNSRFAWMTRKSEETITPWNFEEVVDKGASAQSFIERMTNFDKNLPNEKVLPKHSLLYEYFTVYNELTKVKYVTEGMRKPAFLSGEQKKAIVDLLFKTNRKVTVKQLKEDYFKKIECFDSVEISGVEDRFNASLGTYHDLLKIIKDKDFLDNEENEDILEDIVLTLTLFEDREMIEERLKTYAHLFDDKVMKQLKRRRYTGWGRLSRKLINGIRDKQSGKTILDFLKSDGFANRNFMQLIHDDSLTFKEDIQKAQVSGQGDSLHEHIANLAGSPAIKKGILQTVKVVDELVKVMGRHKPENIVIEMARENQTTQKGQKNSRERMKRIEEGIKELGSQILKEHPVENTQLQNEKLYLYYLQNGRDMYVDQELDINRLSDYDVDHIVPQSFLKDDSIDNKVLTRSDKNRGKSDNVPSEEVVKKMKNYWRQLLNAKLITQRKFDNLTKAERGGLSELDKAGFIKRQLVETRQITKHVAQILDSRMNTKYDENDKLIREVKVITLKSKLVSDFRKDFQFYKVREINNYHHAHDAYLNAVVGTALIKKYPKLESEFVYGDYKVYDVRKMIAKSEQEIGKATAKYFFYSNIMNFFKTEITLANGEIRKRPLIETNGETGEIVWDKGRDFATVRKVLSMPQVNIVKKTEVQTGGFSKESILPKRNSDKLIARKKDWDPKKYGGFDSPTVAYSVLVVAKVEKGKSKKLKSVKELLGITIMERSSFEKNPIDFLEAKGYKEVKKDLIIKLPKYSLFELENGRKRMLASAGELQKGNELALPSKYVNFLYLASHYEKLKGSPEDNEQKQLFVEQHKHYLDEIIEQISEFSKRVILADANLDKVLSAYNKHRDKPIREQAENIIHLFTLTNLGAPAAFKYFDTTIDRKRYTSTKEVLDATLIHQSITGLYETRIDLSQLGGDSRADPKKKRKVGGGSAGDMRAANLWPSPLMIKRSKKNSLALSLTADQMVSALLDAEPPILYSEYDPTRPFSEASMMGLLTNLADRELVHMINWAKRVPGFVDLTLHDQVHLLECAWLEILMIGLVWRSMEHPVKLLFAPNLLLDRNQGKCVEGMVEIFDMLLATSSRFRMMNLQGEEFVCLKSIILLNSGVYTFLSSTLKSLEEKDHIHRVLDKITDTLIHLMAKAGLTLQQQHQRLAQLLLILSHIRHMSNKGMEHLYSMKCKNVVPLYDLLLEAADAHRLHAPTSRGGASVEETDQSHLATAGSTSSHSLQKYYITGEAEGFPATA

SEQ ID NO: 344 - protein, 2344 aa, Artificial Sequence
  #Cas9 variant 20
SRADPKKKRKVTGAGDMRAANLWPSPLMIKRSKKNSLALSLTADQMVSALLDAEPPILYSEYDPTRPFSEASMMGLLTNLADRELVHMINWAKRVPGFVDLTLHDQVHLLECAWLEILMIGLVWRSMEHPVKLLFAPNLLLDRNQGKCVEGMVEIFDMLLATSSRFRMMNLQGEEFVCLKSIILLNSGVYTFLSSTLKSLEEKDHIHRVLDKITDTLIHLMAKAGLTLQQQHQRLAQLLLILSHIRHMSNKGMEHLYSMKCKNVVPLYDLLLEAADAHRLHAPTSRGGASVEETDQSHLATAGSTSSHSLQKYYITGEAEGFPATAGGSPRGGSAGDMRAANLWPSPLMIKRSKKNSLALSLTADQMVSALLDAEPPILYSEYDPTRPFSEASMMGLLTNLADRELVHMINWAKRVPGFVDLTLHDQVHLLECAWLEILMIGLVWRSMEHPVKLLFAPNLLLDRNQGKCVEGMVEIFDMLLATSSRFRMMNLQGEEFVCLKSIILLNSGVYTFLSSTLKSLEEKDHIHRVLDKITDTLIHLMAKAGLTLQQQHQRLAQLLLILSHIRHMSNKGMEHLYSMKCKNVVPLYDLLLEAADAHRLHAPTSRGGASVEETDQSHLATAGSTSSHSLQKYYITGEAEGFPATATPESGADKKYSIGLDIGTNSVGWAVITDEYKVPSKKFKVLGNTDRHSIKKNLIGALLFDSGETAEATRLKRTARRRYTRRKNRICYLQEIFSNEMAKVDDSFFHRLEESFLVEEDKKHERHPIFGNIVDEVAYHEKYPTIYHLRKKLVDSTDKADLRLIYLALAHMIKFRGHFLIEGDLNPDNSDVDKLFIQLVQTYNQLFEENPINASGVDAKAILSARLSKSRRLENLIAQLPGEKKNGLFGNLIALSLGLTPNFKSNFDLAEDAKLQLSKDTYDDDLDNLLAQIGDQYADLFLAAKNLSDAILLSDILRVNTEITKAPLSASMIKRYDEHHQDLTLLKALVRQQLPEKYKEIFFDQSKNGYAGYIDGGASQEEFYKFIKPILEKMDGTEELLVKLNREDLLRKQRTFDNGSIPHQIHLGELHAILRRQEDFYPFLKDNREKIEKILTFRIPYYVGPLARGNSRFAWMTRKSEETITPWNFEEVVDKGASAQSFIERMTNFDKNLPNEKVLPKHSLLYEYFTVYNELTKVKYVTEGMRKPAFLSGEQKKAIVDLLFKTNRKVTVKQLKEDYFKKIECFDSVEISGVEDRFNASLGTYHDLLKIIKDKDFLDNEENEDILEDIVLTLTLFEDREMIEERLKTYAHLFDDKVMKQLKRRRYTGWGRLSRKLINGIRDKQSGKTILDFLKSDGFANRNFMQLIHDDSLTFKEDIQKAQVSGQGDSLHEHIANLAGSPAIKKGILQTVKVVDELVKVMGRHKPENIVIEMARENQTTQKGQKNSRERMKRIEEGIKELGSQILKEHPVENTQLQNEKLYLYYLQNGRDMYVDQELDINRLSDYDVDHIVPQSFLKDDSIDNKVLTRSDKNRGKSDNVPSEEVVKKMKNYWRQLLNAKLITQRKFDNLTKAERGGLSELDKAGFIKRQLVETRQITKHVAQILDSRMNTKYDENDKLIREVKVITLKSKLVSDFRKDFQFYKVREINNYHHAHDAYLNAVVGTALIKKYPKLESEFVYGDYKVYDVRKMIAKSEQEIGKATAKYFFYSNIMNFFKTEITLANGEIRKRPLIETNGETGEIVWDKGRDFATVRKVLSMPQVNIVKKTEVQTGGFSKESILPKRNSDKLIARKKDWDPKKYGGFDSPTVAYSVLVVAKVEKGKSKKLKSVKELLGITIMERSSFEKNPIDFLEAKGYKEVKKDLIIKLPKYSLFELENGRKRMLASAGELQKGNELALPSKYVNFLYLASHYEKLKGSPEDNEQKQLFVEQHKHYLDEIIEQISEFSKRVILADANLDKVLSAYNKHRDKPIREQAENIIHLFTLTNLGAPAAFKYFDTTIDRKRYTSTKEVLDATLIHQSITGLYETRIDLSQLGGDSRADPKKKRKVAGDMRAANLWPSPLMIKRSKKNSLALSLTADQMVSALLDAEPPILYSEYDPTRPFSEASMMGLLTNLADRELVHMINWAKRVPGFVDLTLHDQVHLLECAWLEILMIGLVWRSMEHPVKLLFAPNLLLDRNQGKCVEGMVEIFDMLLATSSRFRMMNLQGEEFVCLKSIILLNSGVYTFLSSTLKSLEEKDHIHRVLDKITDTLIHLMAKAGLTLQQQHQRLAQLLLILSHIRHMSNKGMEHLYSMKCKNVVPLYDLLLEAADAHRLHAPTSRGGASVEETDQSHLATAGSTSSHSLQKYYITGEAEGFPATA

SEQ ID NO: 345 - protein, 2347 aa, Artificial Sequence
  #Cas9 variant 21
SRADPKKKRKVTGGGSAGDMRAANLWPSPLMIKRSKKNSLALSLTADQMVSALLDAEPPILYSEYDPTRPFSEASMMGLLTNLADRELVHMINWAKRVPGFVDLTLHDQVHLLECAWLEILMIGLVWRSMEHPVKLLFAPNLLLDRNQGKCVEGMVEIFDMLLATSSRFRMMNLQGEEFVCLKSIILLNSGVYTFLSSTLKSLEEKDHIHRVLDKITDTLIHLMAKAGLTLQQQHQRLAQLLLILSHIRHMSNKGMEHLYSMKCKNVVPLYDLLLEAADAHRLHAPTSRGGASVEETDQSHLATAGSTSSHSLQKYYITGEAEGFPATAGGSPRGGSAGDMRAANLWPSPLMIKRSKKNSLALSLTADQMVSALLDAEPPILYSEYDPTRPFSEASMMGLLTNLADRELVHMINWAKRVPGFVDLTLHDQVHLLECAWLEILMIGLVWRSMEHPVKLLFAPNLLLDRNQGKCVEGMVEIFDMLLATSSRFRMMNLQGEEFVCLKSIILLNSGVYTFLSSTLKSLEEKDHIHRVLDKITDTLIHLMAKAGLTLQQQHQRLAQLLLILSHIRHMSNKGMEHLYSMKCKNVVPLYDLLLEAADAHRLHAPTSRGGASVEETDQSHLATAGSTSSHSLQKYYITGEAEGFPATATPESGADKKYSIGLDIGTNSVGWAVITDEYKVPSKKFKVLGNTDRHSIKKNLIGALLFDSGETAEATRLKRTARRRYTRRKNRICYLQEIFSNEMAKVDDSFFHRLEESFLVEEDKKHERHPIFGNIVDEVAYHEKYPTIYHLRKKLVDSTDKADLRLIYLALAHMIKFRGHFLIEGDLNPDNSDVDKLFIQLVQTYNQLFEENPINASGVDAKAILSARLSKSRRLENLIAQLPGEKKNGLFGNLIALSLGLTPNFKSNFDLAEDAKLQLSKDTYDDDLDNLLAQIGDQYADLFLAAKNLSDAILLSDILRVNTEITKAPLSASMIKRYDEHHQDLTLLKALVRQQLPEKYKEIFFDQSKNGYAGYIDGGASQEEFYKFIKPILEKMDGTEELLVKLNREDLLRKQRTFDNGSIPHQIHLGELHAILRRQEDFYPFLKDNREKIEKILTFRIPYYVGPLARGNSRFAWMTRKSEETITPWNFEEVVDKGASAQSFIERMTNFDKNLPNEKVLPKHSLLYEYFTVYNELTKVKYVTEGMRKPAFLSGEQKKAIVDLLFKTNRKVTVKQLKEDYFKKIECFDSVEISGVEDRFNASLGTYHDLLKIIKDKDFLDNEENEDILEDIVLTLTLFEDREMIEERLKTYAHLFDDKVMKQLKRRRYTGWGRLSRKLINGIRDKQSGKTILDFLKSDGFANRNFMQLIHDDSLTFKEDIQKAQVSGQGDSLHEHIANLAGSPAIKKGILQTVKVVDELVKVMGRHKPENIVIEMARENQTTQKGQKNSRERMKRIEEGIKELGSQILKEHPVENTQLQNEKLYLYYLQNGRDMYVDQELDINRLSDYDVDHIVPQSFLKDDSIDNKVLTRSDKNRGKSDNVPSEEVVKKMKNYWRQLLNAKLITQRKFDNLTKAERGGLSELDKAGFIKRQLVETRQITKHVAQILDSRMNTKYDENDKLIREVKVITLKSKLVSDFRKDFQFYKVREINNYHHAHDAYLNAVVGTALIKKYPKLESEFVYGDYKVYDVRKMIAKSEQEIGKATAKYFFYSNIMNFFKTEITLANGEIRKRPLIETNGETGEIVWDKGRDFATVRKVLSMPQVNIVKKTEVQTGGFSKESILPKRNSDKLIARKKDWDPKKYGGFDSPTVAYSVLVVAKVEKGKSKKLKSVKELLGITIMERSSFEKNPIDFLEAKGYKEVKKDLIIKLPKYSLFELENGRKRMLASAGELQKGNELALPSKYVNFLYLASHYEKLKGSPEDNEQKQLFVEQHKHYLDEIIEQISEFSKRVILADANLDKVLSAYNKHRDKPIREQAENIIHLFTLTNLGAPAAFKYFDTTIDRKRYTSTKEVLDATLIHQSITGLYETRIDLSQLGGDSRADPKKKRKVAGDMRAANLWPSPLMIKRSKKNSLALSLTADQMVSALLDAEPPILYSEYDPTRPFSEASMMGLLTNLADRELVHMINWAKRVPGFVDLTLHDQVHLLECAWLEILMIGLVWRSMEHPVKLLFAPNLLLDRNQGKCVEGMVEIFDMLLATSSRFRMMNLQGEEFVCLKSIILLNSGVYTFLSSTLKSLEEKDHIHRVLDKITDTLIHLMAKAGLTLQQQHQRLAQLLLILSHIRHMSNKGMEHLYSMKCKNVVPLYDLLLEAADAHRLHAPTSRGGASVEETDQSHLATAGSTSSHSLQKYYITGEAEGFPATA

SEQ ID NO: 346 - protein, 2344 aa, Artificial Sequence
  #Cas9 variant 22
SRADPKKKRKVTGGGSAGDMRAANLWPSPLMIKRSKKNSLALSLTADQMVSALLDAEPPILYSEYDPTRPFSEASMMGLLTNLADRELVHMINWAKRVPGFVDLTLHDQVHLLECAWLEILMIGLVWRSMEHPVKLLFAPNLLLDRNQGKCVEGMVEIFDMLLATSSRFRMMNLQGEEFVCLKSIILLNSGVYTFLSSTLKSLEEKDHIHRVLDKITDTLIHLMAKAGLTLQQQHQRLAQLLLILSHIRHMSNKGMEHLYSMKCKNVVPLYDLLLEAADAHRLHAPTSRGGASVEETDQSHLATAGSTSSHSLQKYYITGEAEGFPATAPRGGSAGDMRAANLWPSPLMIKRSKKNSLALSLTADQMVSALLDAEPPILYSEYDPTRPFSEASMMGLLTNLADRELVHMINWAKRVPGFVDLTLHDQVHLLECAWLEILMIGLVWRSMEHPVKLLFAPNLLLDRNQGKCVEGMVEIFDMLLATSSRFRMMNLQGEEFVCLKSIILLNSGVYTFLSSTLKSLEEKDHIHRVLDKITDTLIHLMAKAGLTLQQQHQRLAQLLLILSHIRHMSNKGMEHLYSMKCKNVVPLYDLLLEAADAHRLHAPTSRGGASVEETDQSHLATAGSTSSHSLQKYYITGEAEGFPATATPESGADKKYSIGLDIGTNSVGWAVITDEYKVPSKKFKVLGNTDRHSIKKNLIGALLFDSGETAEATRLKRTARRRYTRRKNRICYLQEIFSNEMAKVDDSFFHRLEESFLVEEDKKHERHPIFGNIVDEVAYHEKYPTIYHLRKKLVDSTDKADLRLIYLALAHMIKFRGHFLIEGDLNPDNSDVDKLFIQLVQTYNQLFEENPINASGVDAKAILSARLSKSRRLENLIAQLPGEKKNGLFGNLIALSLGLTPNFKSNFDLAEDAKLQLSKDTYDDDLDNLLAQIGDQYADLFLAAKNLSDAILLSDILRVNTEITKAPLSASMIKRYDEHHQDLTLLKALVRQQLPEKYKEIFFDQSKNGYAGYIDGGASQEEFYKFIKPILEKMDGTEELLVKLNREDLLRKQRTFDNGSIPHQIHLGELHAILRRQEDFYPFLKDNREKIEKILTFRIPYYVGPLARGNSRFAWMTRKSEETITPWNFEEVVDKGASAQSFIERMTNFDKNLPNEKVLPKHSLLYEYFTVYNELTKVKYVTEGMRKPAFLSGEQKKAIVDLLFKTNRKVTVKQLKEDYFKKIECFDSVEISGVEDRFNASLGTYHDLLKIIKDKDFLDNEENEDILEDIVLTLTLFEDREMIEERLKTYAHLFDDKVMKQLKRRRYTGWGRLSRKLINGIRDKQSGKTILDFLKSDGFANRNFMQLIHDDSLTFKEDIQKAQVSGQGDSLHEHIANLAGSPAIKKGILQTVKVVDELVKVMGRHKPENIVIEMARENQTTQKGQKNSRERMKRIEEGIKELGSQILKEHPVENTQLQNEKLYLYYLQNGRDMYVDQELDINRLSDYDVDHIVPQSFLKDDSIDNKVLTRSDKNRGKSDNVPSEEVVKKMKNYWRQLLNAKLITQRKFDNLTKAERGGLSELDKAGFIKRQLVETRQITKHVAQILDSRMNTKYDENDKLIREVKVITLKSKLVSDFRKDFQFYKVREINNYHHAHDAYLNAVVGTALIKKYPKLESEFVYGDYKVYDVRKMIAKSEQEIGKATAKYFFYSNIMNFFKTEITLANGEIRKRPLIETNGETGEIVWDKGRDFATVRKVLSMPQVNIVKKTEVQTGGFSKESILPKRNSDKLIARKKDWDPKKYGGFDSPTVAYSVLVVAKVEKGKSKKLKSVKELLGITIMERSSFEKNPIDFLEAKGYKEVKKDLIIKLPKYSLFELENGRKRMLASAGELQKGNELALPSKYVNFLYLASHYEKLKGSPEDNEQKQLFVEQHKHYLDEIIEQISEFSKRVILADANLDKVLSAYNKHRDKPIREQAENIIHLFTLTNLGAPAAFKYFDTTIDRKRYTSTKEVLDATLIHQSITGLYETRIDLSQLGGDSRADPKKKRKVAGDMRAANLWPSPLMIKRSKKNSLALSLTADQMVSALLDAEPPILYSEYDPTRPFSEASMMGLLTNLADRELVHMINWAKRVPGFVDLTLHDQVHLLECAWLEILMIGLVWRSMEHPVKLLFAPNLLLDRNQGKCVEGMVEIFDMLLATSSRFRMMNLQGEEFVCLKSIILLNSGVYTFLSSTLKSLEEKDHIHRVLDKITDTLIHLMAKAGLTLQQQHQRLAQLLLILSHIRHMSNKGMEHLYSMKCKNVVPLYDLLLEAADAHRLHAPTSRGGASVEETDQSHLATAGSTSSHSLQKYYITGEAEGFPATA

SEQ ID NO: 347 - protein, 2335 aa, Artificial Sequence
  #Cas9 variant 23
SRADPKKKRKVTGAGDMRAANLWPSPLMIKRSKKNSLALSLTADQMVSALLDAEPPILYSEYDPTRPFSEASMMGLLTNLADRELVHMINWAKRVPGFVDLTLHDQVHLLECAWLEILMIGLVWRSMEHPVKLLFAPNLLLDRNQGKCVEGMVEIFDMLLATSSRFRMMNLQGEEFVCLKSIILLNSGVYTFLSSTLKSLEEKDHIHRVLDKITDTLIHLMAKAGLTLQQQHQRLAQLLLILSHIRHMSNKGMEHLYSMKCKNVVPLYDLLLEAADAHRLHAPTSRGGASVEETDQSHLATAGSTSSHSLQKYYITGEAEGFPATAGADKKYSIGLDIGTNSVGWAVITDEYKVPSKKFKVLGNTDRHSIKKNLIGALLFDSGETAEATRLKRTARRRYTRRKNRICYLQEIFSNEMAKVDDSFFHRLEESFLVEEDKKHERHPIFGNIVDEVAYHEKYPTIYHLRKKLVDSTDKADLRLIYLALAHMIKFRGHFLIEGDLNPDNSDVDKLFIQLVQTYNQLFEENPINASGVDAKAILSARLSKSRRLENLIAQLPGEKKNGLFGNLIALSLGLTPNFKSNFDLAEDAKLQLSKDTYDDDLDNLLAQIGDQYADLFLAAKNLSDAILLSDILRVNTEITKAPLSASMIKRYDEHHQDLTLLKALVRQQLPEKYKEIFFDQSKNGYAGYIDGGASQEEFYKFIKPILEKMDGTEELLVKLNREDLLRKQRTFDNGSIPHQIHLGELHAILRRQEDFYPFLKDNREKIEKILTFRIPYYVGPLARGNSRFAWMTRKSEETITPWNFEEVVDKGASAQSFIERMTNFDKNLPNEKVLPKHSLLYEYFTVYNELTKVKYVTEGMRKPAFLSGEQKKAIVDLLFKTNRKVTVKQLKEDYFKKIECFDSVEISGVEDRFNASLGTYHDLLKIIKDKDFLDNEENEDILEDIVLTLTLFEDREMIEERLKTYAHLFDDKVMKQLKRRRYTGWGRLSRKLINGIRDKQSGKTILDFLKSDGFANRNFMQLIHDDSLTFKEDIQKAQVSGQGDSLHEHIANLAGSPAIKKGILQTVKVVDELVKVMGRHKPENIVIEMARENQTTQKGQKNSRERMKRIEEGIKELGSQILKEHPVENTQLQNEKLYLYYLQNGRDMYVDQELDINRLSDYDVDHIVPQSFLKDDSIDNKVLTRSDKNRGKSDNVPSEEVVKKMKNYWRQLLNAKLITQRKFDNLTKAERGGLSELDKAGFIKRQLVETRQITKHVAQILDSRMNTKYDENDKLIREVKVITLKSKLVSDFRKDFQFYKVREINNYHHAHDAYLNAVVGTALIKKYPKLESEFVYGDYKVYDVRKMIAKSEQEIGKATAKYFFYSNIMNFFKTEITLANGEIRKRPLIETNGETGEIVWDKGRDFATVRKVLSMPQVNIVKKTEVQTGGFSKESILPKRNSDKLIARKKDWDPKKYGGFDSPTVAYSVLVVAKVEKGKSKKLKSVKELLGITIMERSSFEKNPIDFLEAKGYKEVKKDLIIKLPKYSLFELENGRKRMLASAGELQKGNELALPSKYVNFLYLASHYEKLKGSPEDNEQKQLFVEQHKHYLDEIIEQISEFSKRVILADANLDKVLSAYNKHRDKPIREQAENIIHLFTLTNLGAPAAFKYFDTTIDRKRYTSTKEVLDATLIHQSITGLYETRIDLSQLGGDSRADPKKKRKVAGDMRAANLWPSPLMIKRSKKNSLALSLTADQMVSALLDAEPPILYSEYDPTRPFSEASMMGLLTNLADRELVHMINWAKRVPGFVDLTLHDQVHLLECAWLEILMIGLVWRSMEHPVKLLFAPNLLLDRNQGKCVEGMVEIFDMLLATSSRFRMMNLQGEEFVCLKSIILLNSGVYTFLSSTLKSLEEKDHIHRVLDKITDTLIHLMAKAGLTLQQQHQRLAQLLLILSHIRHMSNKGMEHLYSMKCKNVVPLYDLLLEAADAHRLHAPTSRGGASVEETDQSHLATAGSTSSHSLQKYYITGEAEGFPATAPAGAGDMRAANLWPSPLMIKRSKKNSLALSLTADQMVSALLDAEPPILYSEYDPTRPFSEASMMGLLTNLADRELVHMINWAKRVPGFVDLTLHDQVHLLECAWLEILMIGLVWRSMEHPVKLLFAPNLLLDRNQGKCVEGMVEIFDMLLATSSRFRMMNLQGEEFVCLKSIILLNSGVYTFLSSTLKSLEEKDHIHRVLDKITDTLIHLMAKAGLTLQQQHQRLAQLLLILSHIRHMSNKGMEHLYSMKCKNVVPLYDLLLEAADAHRLHAPTSRGGASVEETDQSHLATAGSTSSHSLQKYYITGEAEGFPATA

SEQ ID NO: 348 - protein, 2338 aa, Artificial Sequence
  #Cas9 variant 24
SRADPKKKRKVTGAGDMRAANLWPSPLMIKRSKKNSLALSLTADQMVSALLDAEPPILYSEYDPTRPFSEASMMGLLTNLADRELVHMINWAKRVPGFVDLTLHDQVHLLECAWLEILMIGLVWRSMEHPVKLLFAPNLLLDRNQGKCVEGMVEIFDMLLATSSRFRMMNLQGEEFVCLKSIILLNSGVYTFLSSTLKSLEEKDHIHRVLDKITDTLIHLMAKAGLTLQQQHQRLAQLLLILSHIRHMSNKGMEHLYSMKCKNVVPLYDLLLEAADAHRLHAPTSRGGASVEETDQSHLATAGSTSSHSLQKYYITGEAEGFPATAGADKKYSIGLDIGTNSVGWAVITDEYKVPSKKFKVLGNTDRHSIKKNLIGALLFDSGETAEATRLKRTARRRYTRRKNRICYLQEIFSNEMAKVDDSFFHRLEESFLVEEDKKHERHPIFGNIVDEVAYHEKYPTIYHLRKKLVDSTDKADLRLIYLALAHMIKFRGHFLIEGDLNPDNSDVDKLFIQLVQTYNQLFEENPINASGVDAKAILSARLSKSRRLENLIAQLPGEKKNGLFGNLIALSLGLTPNFKSNFDLAEDAKLQLSKDTYDDDLDNLLAQIGDQYADLFLAAKNLSDAILLSDILRVNTEITKAPLSASMIKRYDEHHQDLTLLKALVRQQLPEKYKEIFFDQSKNGYAGYIDGGASQEEFYKFIKPILEKMDGTEELLVKLNREDLLRKQRTFDNGSIPHQIHLGELHAILRRQEDFYPFLKDNREKIEKILTFRIPYYVGPLARGNSRFAWMTRKSEETITPWNFEEVVDKGASAQSFIERMTNFDKNLPNEKVLPKHSLLYEYFTVYNELTKVKYVTEGMRKPAFLSGEQKKAIVDLLFKTNRKVTVKQLKEDYFKKIECFDSVEISGVEDRFNASLGTYHDLLKIIKDKDFLDNEENEDILEDIVLTLTLFEDREMIEERLKTYAHLFDDKVMKQLKRRRYTGWGRLSRKLINGIRDKQSGKTILDFLKSDGFANRNFMQLIHDDSLTFKEDIQKAQVSGQGDSLHEHIANLAGSPAIKKGILQTVKVVDELVKVMGRHKPENIVIEMARENQTTQKGQKNSRERMKRIEEGIKELGSQILKEHPVENTQLQNEKLYLYYLQNGRDMYVDQELDINRLSDYDVDHIVPQSFLKDDSIDNKVLTRSDKNRGKSDNVPSEEVVKKMKNYWRQLLNAKLITQRKFDNLTKAERGGLSELDKAGFIKRQLVETRQITKHVAQILDSRMNTKYDENDKLIREVKVITLKSKLVSDFRKDFQFYKVREINNYHHAHDAYLNAVVGTALIKKYPKLESEFVYGDYKVYDVRKMIAKSEQEIGKATAKYFFYSNIMNFFKTEITLANGEIRKRPLIETNGETGEIVWDKGRDFATVRKVLSMPQVNIVKKTEVQTGGFSKESILPKRNSDKLIARKKDWDPKKYGGFDSPTVAYSVLVVAKVEKGKSKKLKSVKELLGITIMERSSFEKNPIDFLEAKGYKEVKKDLIIKLPKYSLFELENGRKRMLASAGELQKGNELALPSKYVNFLYLASHYEKLKGSPEDNEQKQLFVEQHKHYLDEIIEQISEFSKRVILADANLDKVLSAYNKHRDKPIREQAENIIHLFTLTNLGAPAAFKYFDTTIDRKRYTSTKEVLDATLIHQSITGLYETRIDLSQLGGDSRADPKKKRKVAGDMRAANLWPSPLMIKRSKKNSLALSLTADQMVSALLDAEPPILYSEYDPTRPFSEASMMGLLTNLADRELVHMINWAKRVPGFVDLTLHDQVHLLECAWLEILMIGLVWRSMEHPVKLLFAPNLLLDRNQGKCVEGMVEIFDMLLATSSRFRMMNLQGEEFVCLKSIILLNSGVYTFLSSTLKSLEEKDHIHRVLDKITDTLIHLMAKAGLTLQQQHQRLAQLLLILSHIRHMSNKGMEHLYSMKCKNVVPLYDLLLEAADAHRLHAPTSRGGASVEETDQSHLATAGSTSSHSLQKYYITGEAEGFPATAPAGGGSAGDMRAANLWPSPLMIKRSKKNSLALSLTADQMVSALLDAEPPILYSEYDPTRPFSEASMMGLLTNLADRELVHMINWAKRVPGFVDLTLHDQVHLLECAWLEILMIGLVWRSMEHPVKLLFAPNLLLDRNQGKCVEGMVEIFDMLLATSSRFRMMNLQGEEFVCLKSIILLNSGVYTFLSSTLKSLEEKDHIHRVLDKITDTLIHLMAKAGLTLQQQHQRLAQLLLILSHIRHMSNKGMEHLYSMKCKNVVPLYDLLLEAADAHRLHAPTSRGGASVEETDQSHLATAGSTSSHSLQKYYITGEAEGFPATA

SEQ ID NO: 349 - protein, 2663 aa, Artificial Sequence
  #Cas9 variant 25
SRADPKKKRKVTGAGDMRAANLWPSPLMIKRSKKNSLALSLTADQMVSALLDAEPPILYSEYDPTRPFSEASMMGLLTNLADRELVHMINWAKRVPGFVDLTLHDQVHLLECAWLEILMIGLVWRSMEHPVKLLFAPNLLLDRNQGKCVEGMVEIFDMLLATSSRFRMMNLQGEEFVCLKSIILLNSGVYTFLSSTLKSLEEKDHIHRVLDKITDTLIHLMAKAGLTLQQQHQRLAQLLLILSHIRHMSNKGMEHLYSMKCKNVVPLYDLLLEAADAHRLHAPTSRGGASVEETDQSHLATAGSTSSHSLQKYYITGEAEGFPATAGGSPRGGSAGDMRAANLWPSPLMIKRSKKNSLALSLTADQMVSALLDAEPPILYSEYDPTRPFSEASMMGLLTNLADRELVHMINWAKRVPGFVDLTLHDQVHLLECAWLEILMIGLVWRSMEHPVKLLFAPNLLLDRNQGKCVEGMVEIFDMLLATSSRFRMMNLQGEEFVCLKSIILLNSGVYTFLSSTLKSLEEKDHIHRVLDKITDTLIHLMAKAGLTLQQQHQRLAQLLLILSHIRHMSNKGMEHLYSMKCKNVVPLYDLLLEAADAHRLHAPTSRGGASVEETDQSHLATAGSTSSHSLQKYYITGEAEGFPATATPESGADKKYSIGLDIGTNSVGWAVITDEYKVPSKKFKVLGNTDRHSIKKNLIGALLFDSGETAEATRLKRTARRRYTRRKNRICYLQEIFSNEMAKVDDSFFHRLEESFLVEEDKKHERHPIFGNIVDEVAYHEKYPTIYHLRKKLVDSTDKADLRLIYLALAHMIKFRGHFLIEGDLNPDNSDVDKLFIQLVQTYNQLFEENPINASGVDAKAILSARLSKSRRLENLIAQLPGEKKNGLFGNLIALSLGLTPNFKSNFDLAEDAKLQLSKDTYDDDLDNLLAQIGDQYADLFLAAKNLSDAILLSDILRVNTEITKAPLSASMIKRYDEHHQDLTLLKALVRQQLPEKYKEIFFDQSKNGYAGYIDGGASQEEFYKFIKPILEKMDGTEELLVKLNREDLLRKQRTFDNGSIPHQIHLGELHAILRRQEDFYPFLKDNREKIEKILTFRIPYYVGPLARGNSRFAWMTRKSEETITPWNFEEVVDKGASAQSFIERMTNFDKNLPNEKVLPKHSLLYEYFTVYNELTKVKYVTEGMRKPAFLSGEQKKAIVDLLFKTNRKVTVKQLKEDYFKKIECFDSVEISGVEDRFNASLGTYHDLLKIIKDKDFLDNEENEDILEDIVLTLTLFEDREMIEERLKTYAHLFDDKVMKQLKRRRYTGWGRLSRKLINGIRDKQSGKTILDFLKSDGFANRNFMQLIHDDSLTFKEDIQKAQVSGQGDSLHEHIANLAGSPAIKKGILQTVKVVDELVKVMGRHKPENIVIEMARENQTTQKGQKNSRERMKRIEEGIKELGSQILKEHPVENTQLQNEKLYLYYLQNGRDMYVDQELDINRLSDYDVDHIVPQSFLKDDSIDNKVLTRSDKNRGKSDNVPSEEVVKKMKNYWRQLLNAKLITQRKFDNLTKAERGGLSELDKAGFIKRQLVETRQITKHVAQILDSRMNTKYDENDKLIREVKVITLKSKLVSDFRKDFQFYKVREINNYHHAHDAYLNAVVGTALIKKYPKLESEFVYGDYKVYDVRKMIAKSEQEIGKATAKYFFYSNIMNFFKTEITLANGEIRKRPLIETNGETGEIVWDKGRDFATVRKVLSMPQVNIVKKTEVQTGGFSKESILPKRNSDKLIARKKDWDPKKYGGFDSPTVAYSVLVVAKVEKGKSKKLKSVKELLGITIMERSSFEKNPIDFLEAKGYKEVKKDLIIKLPKYSLFELENGRKRMLASAGELQKGNELALPSKYVNFLYLASHYEKLKGSPEDNEQKQLFVEQHKHYLDEIIEQISEFSKRVILADANLDKVLSAYNKHRDKPIREQAENIIHLFTLTNLGAPAAFKYFDTTIDRKRYTSTKEVLDATLIHQSITGLYETRIDLSQLGGDSRADPKKKRKVAGDMRAANLWPSPLMIKRSKKNSLALSLTADQMVSALLDAEPPILYSEYDPTRPFSEASMMGLLTNLADRELVHMINWAKRVPGFVDLTLHDQVHLLECAWLEILMIGLVWRSMEHPVKLLFAPNLLLDRNQGKCVEGMVEIFDMLLATSSRFRMMNLQGEEFVCLKSIILLNSGVYTFLSSTLKSLEEKDHIHRVLDKITDTLIHLMAKAGLTLQQQHQRLAQLLLILSHIRHMSNKGMEHLYSMKCKNVVPLYDLLLEAADAHRLHAPTSRGGASVEETDQSHLATAGSTSSHSLQKYYITGEAEGFPATAPAGGGSAGDMRAANLWPSPLMIKRSKKNSLALSLTADQMVSALLDAEPPILYSEYDPTRPFSEASMMGLLTNLADRELVHMINWAKRVPGFVDLTLHDQVHLLECAWLEILMIGLVWRSMEHPVKLLFAPNLLLDRNQGKCVEGMVEIFDMLLATSSRFRMMNLQGEEFVCLKSIILLNSGVYTFLSSTLKSLEEKDHIHRVLDKITDTLIHLMAKAGLTLQQQHQRLAQLLLILSHIRHMSNKGMEHLYSMKCKNVVPLYDLLLEAADAHRLHAPTSRGGASVEETDQSHLATAGSTSSHSLQKYYITGEAEGFPATA

SEQ ID NO: 350 - protein, 2656 aa, Artificial Sequence
  #Cas9 variant 26
  misc_feature (1)..(1): Xaa can be any naturally occurring amino acid
XTGGGSAGDMRAANLWPSPLMIKRSKKNSLALSLTADQMVSALLDAEPPILYSEYDPTRPFSEASMMGLLTNLADRELVHMINWAKRVPGFVDLTLHDQVHLLECAWLEILMIGLVWRSMEHPVKLLFAPNLLLDRNQGKCVEGMVEIFDMLLATSSRFRMMNLQGEEFVCLKSIILLNSGVYTFLSSTLKSLEEKDHIHRVLDKITDTLIHLMAKAGLTLQQQHQRLAQLLLILSHIRHMSNKGMEHLYSMKCKNVVPLYDLLLEAADAHRLHAPTSRGGASVEETDQSHLATAGSTSSHSLQKYYITGEAEGFPATAGGSPRGGSAGDMRAANLWPSPLMIKRSKKNSLALSLTADQMVSALLDAEPPILYSEYDPTRPFSEASMMGLLTNLADRELVHMINWAKRVPGFVDLTLHDQVHLLECAWLEILMIGLVWRSMEHPVKLLFAPNLLLDRNQGKCVEGMVEIFDMLLATSSRFRMMNLQGEEFVCLKSIILLNSGVYTFLSSTLKSLEEKDHIHRVLDKITDTLIHLMAKAGLTLQQQHQRLAQLLLILSHIRHMSNKGMEHLYSMKCKNVVPLYDLLLEAADAHRLHAPTSRGGASVEETDQSHLATAGSTSSHSLQKYYITGEAEGFPATATPESGADKKYSIGLDIGTNSVGWAVITDEYKVPSKKFKVLGNTDRHSIKKNLIGALLFDSGETAEATRLKRTARRRYTRRKNRICYLQEIFSNEMAKVDDSFFHRLEESFLVEEDKKHERHPIFGNIVDEVAYHEKYPTIYHLRKKLVDSTDKADLRLIYLALAHMIKFRGHFLIEGDLNPDNSDVDKLFIQLVQTYNQLFEENPINASGVDAKAILSARLSKSRRLENLIAQLPGEKKNGLFGNLIALSLGLTPNFKSNFDLAEDAKLQLSKDTYDDDLDNLLAQIGDQYADLFLAAKNLSDAILLSDILRVNTEITKAPLSASMIKRYDEHHQDLTLLKALVRQQLPEKYKEIFFDQSKNGYAGYIDGGASQEEFYKFIKPILEKMDGTEELLVKLNREDLLRKQRTFDNGSIPHQIHLGELHAILRRQEDFYPFLKDNREKIEKILTFRIPYYVGPLARGNSRFAWMTRKSEETITPWNFEEVVDKGASAQSFIERMTNFDKNLPNEKVLPKHSLLYEYFTVYNELTKVKYVTEGMRKPAFLSGEQKKAIVDLLFKTNRKVTVKQLKEDYFKKIECFDSVEISGVEDRFNASLGTYHDLLKIIKDKDFLDNEENEDILEDIVLTLTLFEDREMIEERLKTYAHLFDDKVMKQLKRRRYTGWGRLSRKLINGIRDKQSGKTILDFLKSDGFANRNFMQLIHDDSLTFKEDIQKAQVSGQGDSLHEHIANLAGSPAIKKGILQTVKVVDELVKVMGRHKPENIVIEMARENQTTQKGQKNSRERMKRIEEGIKELGSQILKEHPVENTQLQNEKLYLYYLQNGRDMYVDQELDINRLSDYDVDHIVPQSFLKDDSIDNKVLTRSDKNRGKSDNVPSEEVVKKMKNYWRQLLNAKLITQRKFDNLTKAERGGLSELDKAGFIKRQLVETRQITKHVAQILDSRMNTKYDENDKLIREVKVITLKSKLVSDFRKDFQFYKVREINNYHHAHDAYLNAVVGTALIKKYPKLESEFVYGDYKVYDVRKMIAKSEQEIGKATAKYFFYSNIMNFFKTEITLANGEIRKRPLIETNGETGEIVWDKGRDFATVRKVLSMPQVNIVKKTEVQTGGFSKESILPKRNSDKLIARKKDWDPKKYGGFDSPTVAYSVLVVAKVEKGKSKKLKSVKELLGITIMERSSFEKNPIDFLEAKGYKEVKKDLIIKLPKYSLFELENGRKRMLASAGELQKGNELALPSKYVNFLYLASHYEKLKGSPEDNEQKQLFVEQHKHYLDEIIEQISEFSKRVILADANLDKVLSAYNKHRDKPIREQAENIIHLFTLTNLGAPAAFKYFDTTIDRKRYTSTKEVLDATLIHQSITGLYETRIDLSQLGGDSRADPKKKRKVAGDMRAANLWPSPLMIKRSKKNSLALSLTADQMVSALLDAEPPILYSEYDPTRPFSEASMMGLLTNLADRELVHMINWAKRVPGFVDLTLHDQVHLLECAWLEILMIGLVWRSMEHPVKLLFAPNLLLDRNQGKCVEGMVEIFDMLLATSSRFRMMNLQGEEFVCLKSIILLNSGVYTFLSSTLKSLEEKDHIHRVLDKITDTLIHLMAKAGLTLQQQHQRLAQLLLILSHIRHMSNKGMEHLYSMKCKNVVPLYDLLLEAADAHRLHAPTSRGGASVEETDQSHLATAGSTSSHSLQKYYITGEAEGFPATAPAGGGSAGDMRAANLWPSPLMIKRSKKNSLALSLTADQMVSALLDAEPPILYSEYDPTRPFSEASMMGLLTNLADRELVHMINWAKRVPGFVDLTLHDQVHLLECAWLEILMIGLVWRSMEHPVKLLFAPNLLLDRNQGKCVEGMVEIFDMLLATSSRFRMMNLQGEEFVCLKSIILLNSGVYTFLSSTLKSLEEKDHIHRVLDKITDTLIHLMAKAGLTLQQQHQRLAQLLLILSHIRHMSNKGMEHLYSMKCKNVVPLYDLLLEAADAHRLHAPTSRGGASVEETDQSHLATAGSTSSHSLQKYYITGEAEGFPATA

SEQ ID NO: 351 - protein, 2660 aa, Artificial Sequence
  #Cas9 variant 27
SRADPKKKRKVTGGGSAGDMRAANLWPSPLMIKRSKKNSLALSLTADQMVSALLDAEPPILYSEYDPTRPFSEASMMGLLTNLADRELVHMINWAKRVPGFVDLTLHDQVHLLECAWLEILMIGLVWRSMEHPVKLLFAPNLLLDRNQGKCVEGMVEIFDMLLATSSRFRMMNLQGEEFVCLKSIILLNSGVYTFLSSTLKSLEEKDHIHRVLDKITDTLIHLMAKAGLTLQQQHQRLAQLLLILSHIRHMSNKGMEHLYSMKCKNVVPLYDLLLEAADAHRLHAPTSRGGASVEETDQSHLATAGSTSSHSLQKYYITGEAEGFPATAPRGGSAGDMRAANLWPSPLMIKRSKKNSLALSLTADQMVSALLDAEPPILYSEYDPTRPFSEASMMGLLTNLADRELVHMINWAKRVPGFVDLTLHDQVHLLECAWLEILMIGLVWRSMEHPVKLLFAPNLLLDRNQGKCVEGMVEIFDMLLATSSRFRMMNLQGEEFVCLKSIILLNSGVYTFLSSTLKSLEEKDHIHRVLDKITDTLIHLMAKAGLTLQQQHQRLAQLLLILSHIRHMSNKGMEHLYSMKCKNVVPLYDLLLEAADAHRLHAPTSRGGASVEETDQSHLATAGSTSSHSLQKYYITGEAEGFPATATPESGADKKYSIGLDIGTNSVGWAVITDEYKVPSKKFKVLGNTDRHSIKKNLIGALLFDSGETAEATRLKRTARRRYTRRKNRICYLQEIFSNEMAKVDDSFFHRLEESFLVEEDKKHERHPIFGNIVDEVAYHEKYPTIYHLRKKLVDSTDKADLRLIYLALAHMIKFRGHFLIEGDLNPDNSDVDKLFIQLVQTYNQLFEENPINASGVDAKAILSARLSKSRRLENLIAQLPGEKKNGLFGNLIALSLGLTPNFKSNFDLAEDAKLQLSKDTYDDDLDNLLAQIGDQYADLFLAAKNLSDAILLSDILRVNTEITKAPLSASMIKRYDEHHQDLTLLKALVRQQLPEKYKEIFFDQSKNGYAGYIDGGASQEEFYKFIKPILEKMDGTEELLVKLNREDLLRKQRTFDNGSIPHQIHLGELHAILRRQEDFYPFLKDNREKIEKILTFRIPYYVGPLARGNSRFAWMTRKSEETITPWNFEEVVDKGASAQSFIERMTNFDKNLPNEKVLPKHSLLYEYFTVYNELTKVKYVTEGMRKPAFLSGEQKKAIVDLLFKTNRKVTVKQLKEDYFKKIECFDSVEISGVEDRFNASLGTYHDLLKIIKDKDFLDNEENEDILEDIVLTLTLFEDREMIEERLKTYAHLFDDKVMKQLKRRRYTGWGRLSRKLINGIRDKQSGKTILDFLKSDGFANRNFMQLIHDDSLTFKEDIQKAQVSGQGDSLHEHIANLAGSPAIKKGILQTVKVVDELVKVMGRHKPENIVIEMARENQTTQKGQKNSRERMKRIEEGIKELGSQILKEHPVENTQLQNEKLYLYYLQNGRDMYVDQELDINRLSDYDVDHIVPQSFLKDDSIDNKVLTRSDKNRGKSDNVPSEEVVKKMKNYWRQLLNAKLITQRKFDNLTKAERGGLSELDKAGFIKRQLVETRQITKHVAQILDSRMNTKYDENDKLIREVKVITLKSKLVSDFRKDFQFYKVREINNYHHAHDAYLNAVVGTALIKKYPKLESEFVYGDYKVYDVRKMIAKSEQEIGKATAKYFFYSNIMNFFKTEITLANGEIRKRPLIETNGETGEIVWDKGRDFATVRKVLSMPQVNIVKKTEVQTGGFSKESILPKRNSDKLIARKKDWDPKKYGGFDSPTVAYSVLVVAKVEKGKSKKLKSVKELLGITIMERSSFEKNPIDFLEAKGYKEVKKDLIIKLPKYSLFELENGRKRMLASAGELQKGNELALPSKYVNFLYLASHYEKLKGSPEDNEQKQLFVEQHKHYLDEIIEQISEFSKRVILADANLDKVLSAYNKHRDKPIREQAENIIHLFTLTNLGAPAAFKYFDTTIDRKRYTSTKEVLDATLIHQSITGLYETRIDLSQLGGDSRADPKKKRKVAGDMRAANLWPSPLMIKRSKKNSLALSLTADQMVSALLDAEPPILYSEYDPTRPFSEASMMGLLTNLADRELVHMINWAKRVPGFVDLTLHDQVHLLECAWLEILMIGLVWRSMEHPVKLLFAPNLLLDRNQGKCVEGMVEIFDMLLATSSRFRMMNLQGEEFVCLKSIILLNSGVYTFLSSTLKSLEEKDHIHRVLDKITDTLIHLMAKAGLTLQQQHQRLAQLLLILSHIRHMSNKGMEHLYSMKCKNVVPLYDLLLEAADAHRLHAPTSRGGASVEETDQSHLATAGSTSSHSLQKYYITGEAEGFPATAPAGAGDMRAANLWPSPLMIKRSKKNSLALSLTADQMVSALLDAEPPILYSEYDPTRPFSEASMMGLLTNLADRELVHMINWAKRVPGFVDLTLHDQVHLLECAWLEILMIGLVWRSMEHPVKLLFAPNLLLDRNQGKCVEGMVEIFDMLLATSSRFRMMNLQGEEFVCLKSIILLNSGVYTFLSSTLKSLEEKDHIHRVLDKITDTLIHLMAKAGLTLQQQHQRLAQLLLILSHIRHMSNKGMEHLYSMKCKNVVPLYDLLLEAADAHRLHAPTSRGGASVEETDQSHLATAGSTSSHSLQKYYITGEAEGFPATA

SEQ ID NO: 352 - protein, 2663 aa, Artificial Sequence
  #Cas9 variant 28
SRADPKKKRKVTGGGSAGDMRAANLWPSPLMIKRSKKNSLALSLTADQMVSALLDAEPPILYSEYDPTRPFSEASMMGLLTNLADRELVHMINWAKRVPGFVDLTLHDQVHLLECAWLEILMIGLVWRSMEHPVKLLFAPNLLLDRNQGKCVEGMVEIFDMLLATSSRFRMMNLQGEEFVCLKSIILLNSGVYTFLSSTLKSLEEKDHIHRVLDKITDTLIHLMAKAGLTLQQQHQRLAQLLLILSHIRHMSNKGMEHLYSMKCKNVVPLYDLLLEAADAHRLHAPTSRGGASVEETDQSHLATAGSTSSHSLQKYYITGEAEGFPATAGGSPRGGSAGDMRAANLWPSPLMIKRSKKNSLALSLTADQMVSALLDAEPPILYSEYDPTRPFSEASMMGLLTNLADRELVHMINWAKRVPGFVDLTLHDQVHLLECAWLEILMIGLVWRSMEHPVKLLFAPNLLLDRNQGKCVEGMVEIFDMLLATSSRFRMMNLQGEEFVCLKSIILLNSGVYTFLSSTLKSLEEKDHIHRVLDKITDTLIHLMAKAGLTLQQQHQRLAQLLLILSHIRHMSNKGMEHLYSMKCKNVVPLYDLLLEAADAHRLHAPTSRGGASVEETDQSHLATAGSTSSHSLQKYYITGEAEGFPATATPESGADKKYSIGLDIGTNSVGWAVITDEYKVPSKKFKVLGNTDRHSIKKNLIGALLFDSGETAEATRLKRTARRRYTRRKNRICYLQEIFSNEMAKVDDSFFHRLEESFLVEEDKKHERHPIFGNIVDEVAYHEKYPTIYHLRKKLVDSTDKADLRLIYLALAHMIKFRGHFLIEGDLNPDNSDVDKLFIQLVQTYNQLFEENPINASGVDAKAILSARLSKSRRLENLIAQLPGEKKNGLFGNLIALSLGLTPNFKSNFDLAEDAKLQLSKDTYDDDLDNLLAQIGDQYADLFLAAKNLSDAILLSDILRVNTEITKAPLSASMIKRYDEHHQDLTLLKALVRQQLPEKYKEIFFDQSKNGYAGYIDGGASQEEFYKFIKPILEKMDGTEELLVKLNREDLLRKQRTFDNGSIPHQIHLGELHAILRRQEDFYPFLKDNREKIEKILTFRIPYYVGPLARGNSRFAWMTRKSEETITPWNFEEVVDKGASAQSFIERMTNFDKNLPNEKVLPKHSLLYEYFTVYNELTKVKYVTEGMRKPAFLSGEQKKAIVDLLFKTNRKVTVKQLKEDYFKKIECFDSVEISGVEDRFNASLGTYHDLLKIIKDKDFLDNEENEDILEDIVLTLTLFEDREMIEERLKTYAHLFDDKVMKQLKRRRYTGWGRLSRKLINGIRDKQSGKTILDFLKSDGFANRNFMQLIHDDSLTFKEDIQKAQVSGQGDSLHEHIANLAGSPAIKKGILQTVKVVDELVKVMGRHKPENIVIEMARENQTTQKGQKNSRERMKRIEEGIKELGSQILKEHPVENTQLQNEKLYLYYLQNGRDMYVDQELDINRLSDYDVDHIVPQSFLKDDSIDNKVLTRSDKNRGKSDNVPSEEVVKKMKNYWRQLLNAKLITQRKFDNLTKAERGGLSELDKAGFIKRQLVETRQITKHVAQILDSRMNTKYDENDKLIREVKVITLKSKLVSDFRKDFQFYKVREINNYHHAHDAYLNAVVGTALIKKYPKLESEFVYGDYKVYDVRKMIAKSEQEIGKATAKYFFYSNIMNFFKTEITLANGEIRKRPLIETNGETGEIVWDKGRDFATVRKVLSMPQVNIVKKTEVQTGGFSKESILPKRNSDKLIARKKDWDPKKYGGFDSPTVAYSVLVVAKVEKGKSKKLKSVKELLGITIMERSSFEKNPIDFLEAKGYKEVKKDLIIKLPKYSLFELENGRKRMLASAGELQKGNELALPSKYVNFLYLASHYEKLKGSPEDNEQKQLFVEQHKHYLDEIIEQISEFSKRVILADANLDKVLSAYNKHRDKPIREQAENIIHLFTLTNLGAPAAFKYFDTTIDRKRYTSTKEVLDATLIHQSITGLYETRIDLSQLGGDSRADPKKKRKVAGDMRAANLWPSPLMIKRSKKNSLALSLTADQMVSALLDAEPPILYSEYDPTRPFSEASMMGLLTNLADRELVHMINWAKRVPGFVDLTLHDQVHLLECAWLEILMIGLVWRSMEHPVKLLFAPNLLLDRNQGKCVEGMVEIFDMLLATSSRFRMMNLQGEEFVCLKSIILLNSGVYTFLSSTLKSLEEKDHIHRVLDKITDTLIHLMAKAGLTLQQQHQRLAQLLLILSHIRHMSNKGMEHLYSMKCKNVVPLYDLLLEAADAHRLHAPTSRGGASVEETDQSHLATAGSTSSHSLQKYYITGEAEGFPATAPAGAGDMRAANLWPSPLMIKRSKKNSLALSLTADQMVSALLDAEPPILYSEYDPTRPFSEASMMGLLTNLADRELVHMINWAKRVPGFVDLTLHDQVHLLECAWLEILMIGLVWRSMEHPVKLLFAPNLLLDRNQGKCVEGMVEIFDMLLATSSRFRMMNLQGEEFVCLKSIILLNSGVYTFLSSTLKSLEEKDHIHRVLDKITDTLIHLMAKAGLTLQQQHQRLAQLLLILSHIRHMSNKGMEHLYSMKCKNVVPLYDLLLEAADAHRLHAPTSRGGASVEETDQSHLATAGSTSSHSLQKYYITGEAEGFPATA

SEQ ID NO: 353 - protein, 2660 aa, Artificial Sequence
  #Cas9 variant 29
SRADPKKKRKVTGAGDMRAANLWPSPLMIKRSKKNSLALSLTADQMVSALLDAEPPILYSEYDPTRPFSEASMMGLLTNLADRELVHMINWAKRVPGFVDLTLHDQVHLLECAWLEILMIGLVWRSMEHPVKLLFAPNLLLDRNQGKCVEGMVEIFDMLLATSSRFRMMNLQGEEFVCLKSIILLNSGVYTFLSSTLKSLEEKDHIHRVLDKITDTLIHLMAKAGLTLQQQHQRLAQLLLILSHIRHMSNKGMEHLYSMKCKNVVPLYDLLLEAADAHRLHAPTSRGGASVEETDQSHLATAGSTSSHSLQKYYITGEAEGFPATAGGSPRGGSAGDMRAANLWPSPLMIKRSKKNSLALSLTADQMVSALLDAEPPILYSEYDPTRPFSEASMMGLLTNLADRELVHMINWAKRVPGFVDLTLHDQVHLLECAWLEILMIGLVWRSMEHPVKLLFAPNLLLDRNQGKCVEGMVEIFDMLLATSSRFRMMNLQGEEFVCLKSIILLNSGVYTFLSSTLKSLEEKDHIHRVLDKITDTLIHLMAKAGLTLQQQHQRLAQLLLILSHIRHMSNKGMEHLYSMKCKNVVPLYDLLLEAADAHRLHAPTSRGGASVEETDQSHLATAGSTSSHSLQKYYITGEAEGFPATATPESGADKKYSIGLDIGTNSVGWAVITDEYKVPSKKFKVLGNTDRHSIKKNLIGALLFDSGETAEATRLKRTARRRYTRRKNRICYLQEIFSNEMAKVDDSFFHRLEESFLVEEDKKHERHPIFGNIVDEVAYHEKYPTIYHLRKKLVDSTDKADLRLIYLALAHMIKFRGHFLIEGDLNPDNSDVDKLFIQLVQTYNQLFEENPINASGVDAKAILSARLSKSRRLENLIAQLPGEKKNGLFGNLIALSLGLTPNFKSNFDLAEDAKLQLSKDTYDDDLDNLLAQIGDQYADLFLAAKNLSDAILLSDILRVNTEITKAPLSASMIKRYDEHHQDLTLLKALVRQQLPEKYKEIFFDQSKNGYAGYIDGGASQEEFYKFIKPILEKMDGTEELLVKLNREDLLRKQRTFDNGSIPHQIHLGELHAILRRQEDFYPFLKDNREKIEKILTFRIPYYVGPLARGNSRFAWMTRKSEETITPWNFEEVVDKGASAQSFIERMTNFDKNLPNEKVLPKHSLLYEYFTVYNELTKVKYVTEGMRKPAFLSGEQKKAIVDLLFKTNRKVTVKQLKEDYFKKIECFDSVEISGVEDRFNASLGTYHDLLKIIKDKDFLDNEENEDILEDIVLTLTLFEDREMIEERLKTYAHLFDDKVMKQLKRRRYTGWGRLSRKLINGIRDKQSGKTILDFLKSDGFANRNFMQLIHDDSLTFKEDIQKAQVSGQGDSLHEHIANLAGSPAIKKGILQTVKVVDELVKVMGRHKPENIVIEMARENQTTQKGQKNSRERMKRIEEGIKELGSQILKEHPVENTQLQNEKLYLYYLQNGRDMYVDQELDINRLSDYDVDHIVPQSFLKDDSIDNKVLTRSDKNRGKSDNVPSEEVVKKMKNYWRQLLNAKLITQRKFDNLTKAERGGLSELDKAGFIKRQLVETRQITKHVAQILDSRMNTKYDENDKLIREVKVITLKSKLVSDFRKDFQFYKVREINNYHHAHDAYLNAVVGTALIKKYPKLESEFVYGDYKVYDVRKMIAKSEQEIGKATAKYFFYSNIMNFFKTEITLANGEIRKRPLIETNGETGEIVWDKGRDFATVRKVLSMPQVNIVKKTEVQTGGFSKESILPKRNSDKLIARKKDWDPKKYGGFDSPTVAYSVLVVAKVEKGKSKKLKSVKELLGITIMERSSFEKNPIDFLEAKGYKEVKKDLIIKLPKYSLFELENGRKRMLASAGELQKGNELALPSKYVNFLYLASHYEKLKGSPEDNEQKQLFVEQHKHYLDEIIEQISEFSKRVILADANLDKVLSAYNKHRDKPIREQAENIIHLFTLTNLGAPAAFKYFDTTIDRKRYTSTKEVLDATLIHQSITGLYETRIDLSQLGGDSRADPKKKRKVAGDMRAANLWPSPLMIKRSKKNSLALSLTADQMVSALLDAEPPILYSEYDPTRPFSEASMMGLLTNLADRELVHMINWAKRVPGFVDLTLHDQVHLLECAWLEILMIGLVWRSMEHPVKLLFAPNLLLDRNQGKCVEGMVEIFDMLLATSSRFRMMNLQGEEFVCLKSIILLNSGVYTFLSSTLKSLEEKDHIHRVLDKITDTLIHLMAKAGLTLQQQHQRLAQLLLILSHIRHMSNKGMEHLYSMKCKNVVPLYDLLLEAADAHRLHAPTSRGGASVEETDQSHLATAGSTSSHSLQKYYITGEAEGFPATAPAGAGDMRAANLWPSPLMIKRSKKNSLALSLTADQMVSALLDAEPPILYSEYDPTRPFSEASMMGLLTNLADRELVHMINWAKRVPGFVDLTLHDQVHLLECAWLEILMIGLVWRSMEHPVKLLFAPNLLLDRNQGKCVEGMVEIFDMLLATSSRFRMMNLQGEEFVCLKSIILLNSGVYTFLSSTLKSLEEKDHIHRVLDKITDTLIHLMAKAGLTLQQQHQRLAQLLLILSHIRHMSNKGMEHLYSMKCKNVVPLYDLLLEAADAHRLHAPTSRGGASVEETDQSHLATAGSTSSHSLQKYYITGEAEGFPATA

SEQ ID NO: 354 - protein, 2663 aa, Artificial Sequence
  #Cas9 variant 30
SRADPKKKRKVTGGGSAGDMRAANLWPSPLMIKRSKKNSLALSLTADQMVSALLDAEPPILYSEYDPTRPFSEASMMGLLTNLADRELVHMINWAKRVPGFVDLTLHDQVHLLECAWLEILMIGLVWRSMEHPVKLLFAPNLLLDRNQGKCVEGMVEIFDMLLATSSRFRMMNLQGEEFVCLKSIILLNSGVYTFLSSTLKSLEEKDHIHRVLDKITDTLIHLMAKAGLTLQQQHQRLAQLLLILSHIRHMSNKGMEHLYSMKCKNVVPLYDLLLEAADAHRLHAPTSRGGASVEETDQSHLATAGSTSSHSLQKYYITGEAEGFPATAPRGGSAGDMRAANLWPSPLMIKRSKKNSLALSLTADQMVSALLDAEPPILYSEYDPTRPFSEASMMGLLTNLADRELVHMINWAKRVPGFVDLTLHDQVHLLECAWLEILMIGLVWRSMEHPVKLLFAPNLLLDRNQGKCVEGMVEIFDMLLATSSRFRMMNLQGEEFVCLKSIILLNSGVYTFLSSTLKSLEEKDHIHRVLDKITDTLIHLMAKAGLTLQQQHQRLAQLLLILSHIRHMSNKGMEHLYSMKCKNVVPLYDLLLEAADAHRLHAPTSRGGASVEETDQSHLATAGSTSSHSLQKYYITGEAEGFPATATPESGADKKYSIGLDIGTNSVGWAVITDEYKVPSKKFKVLGNTDRHSIKKNLIGALLFDSGETAEATRLKRTARRRYTRRKNRICYLQEIFSNEMAKVDDSFFHRLEESFLVEEDKKHERHPIFGNIVDEVAYHEKYPTIYHLRKKLVDSTDKADLRLIYLALAHMIKFRGHFLIEGDLNPDNSDVDKLFIQLVQTYNQLFEENPINASGVDAKAILSARLSKSRRLENLIAQLPGEKKNGLFGNLIALSLGLTPNFKSNFDLAEDAKLQLSKDTYDDDLDNLLAQIGDQYADLFLAAKNLSDAILLSDILRVNTEITKAPLSASMIKRYDEHHQDLTLLKALVRQQLPEKYKEIFFDQSKNGYAGYIDGGASQEEFYKFIKPILEKMDGTEELLVKLNREDLLRKQRTFDNGSIPHQIHLGELHAILRRQEDFYPFLKDNREKIEKILTFRIPYYVGPLARGNSRFAWMTRKSEETITPWNFEEVVDKGASAQSFIERMTNFDKNLPNEKVLPKHSLLYEYFTVYNELTKVKYVTEGMRKPAFLSGEQKKAIVDLLFKTNRKVTVKQLKEDYFKKIECFDSVEISGVEDRFNASLGTYHDLLKIIKDKDFLDNEENEDILEDIVLTLTLFEDREMIEERLKTYAHLFDDKVMKQLKRRRYTGWGRLSRKLINGIRDKQSGKTILDFLKSDGFANRNFMQLIHDDSLTFKEDIQKAQVSGQGDSLHEHIANLAGSPAIKKGILQTVKVVDELVKVMGRHKPENIVIEMARENQTTQKGQKNSRERMKRIEEGIKELGSQILKEHPVENTQLQNEKLYLYYLQNGRDMYVDQELDINRLSDYDVDHIVPQSFLKDDSIDNKVLTRSDKNRGKSDNVPSEEVVKKMKNYWRQLLNAKLITQRKFDNLTKAERGGLSELDKAGFIKRQLVETRQITKHVAQILDSRMNTKYDENDKLIREVKVITLKSKLVSDFRKDFQFYKVREINNYHHAHDAYLNAVVGTALIKKYPKLESEFVYGDYKVYDVRKMIAKSEQEIGKATAKYFFYSNIMNFFKTEITLANGEIRKRPLIETNGETGEIVWDKGRDFATVRKVLSMPQVNIVKKTEVQTGGFSKESILPKRNSDKLIARKKDWDPKKYGGFDSPTVAYSVLVVAKVEKGKSKKLKSVKELLGITIMERSSFEKNPIDFLEAKGYKEVKKDLIIKLPKYSLFELENGRKRMLASAGELQKGNELALPSKYVNFLYLASHYEKLKGSPEDNEQKQLFVEQHKHYLDEIIEQISEFSKRVILADANLDKVLSAYNKHRDKPIREQAENIIHLFTLTNLGAPAAFKYFDTTIDRKRYTSTKEVLDATLIHQSITGLYETRIDLSQLGGDSRADPKKKRKVAGDMRAANLWPSPLMIKRSKKNSLALSLTADQMVSALLDAEPPILYSEYDPTRPFSEASMMGLLTNLADRELVHMINWAKRVPGFVDLTLHDQVHLLECAWLEILMIGLVWRSMEHPVKLLFAPNLLLDRNQGKCVEGMVEIFDMLLATSSRFRMMNLQGEEFVCLKSIILLNSGVYTFLSSTLKSLEEKDHIHRVLDKITDTLIHLMAKAGLTLQQQHQRLAQLLLILSHIRHMSNKGMEHLYSMKCKNVVPLYDLLLEAADAHRLHAPTSRGGASVEETDQSHLATAGSTSSHSLQKYYITGEAEGFPATAPAGGGSAGDMRAANLWPSPLMIKRSKKNSLALSLTADQMVSALLDAEPPILYSEYDPTRPFSEASMMGLLTNLADRELVHMINWAKRVPGFVDLTLHDQVHLLECAWLEILMIGLVWRSMEHPVKLLFAPNLLLDRNQGKCVEGMVEIFDMLLATSSRFRMMNLQGEEFVCLKSIILLNSGVYTFLSSTLKSLEEKDHIHRVLDKITDTLIHLMAKAGLTLQQQHQRLAQLLLILSHIRHMSNKGMEHLYSMKCKNVVPLYDLLLEAADAHRLHAPTSRGGASVEETDQSHLATAGSTSSHSLQKYYITGEAEGFPATA

SEQ ID NO: 355 - protein, 2021 aa, Artificial Sequence
  Cas9 variant 12 linkers
SRADPKKKRKVTGGGSAGDMRAANLWPSPLMIKRSKKNSLALSLTADQMVSALLDAEPPILYSEYDPTRPFSEASMMGLLTNLADRELVHMINWAKRVPGFVDLTLHDQVHLLECAWLEILMIGLVWRSMEHPVKLLFAPNLLLDRNQGKCVEGMVEIFDMLLATSSRFRMMNLQGEEFVCLKSIILLNSGVYTFLSSTLKSLEEKDHIHRVLDKITDTLIHLMAKAGLTLQQQHQRLAQLLLILSHIRHMSNKGMEHLYSMKCKNVVPLYDLLLEAADAHRLHAPTSRGGASVEETDQSHLATAGSTSSHSLQKYYITGEAEGFPATASGSETPGTSEGADKKYSIGLDIGTNSVGWAVITDEYKVPSKKFKVLGNTDRHSIKKNLIGALLFDSGETAEATRLKRTARRRYTRRKNRICYLQEIFSNEMAKVDDSFFHRLEESFLVEEDKKHERHPIFGNIVDEVAYHEKYPTIYHLRKKLVDSTDKADLRLIYLALAHMIKFRGHFLIEGDLNPDNSDVDKLFIQLVQTYNQLFEENPINASGVDAKAILSARLSKSRRLENLIAQLPGEKKNGLFGNLIALSLGLTPNFKSNFDLAEDAKLQLSKDTYDDDLDNLLAQIGDQYADLFLAAKNLSDAILLSDILRVNTEITKAPLSASMIKRYDEHHQDLTLLKALVRQQLPEKYKEIFFDQSKNGYAGYIDGGASQEEFYKFIKPILEKMDGTEELLVKLNREDLLRKQRTFDNGSIPHQIHLGELHAILRRQEDFYPFLKDNREKIEKILTFRIPYYVGPLARGNSRFAWMTRKSEETITPWNFEEVVDKGASAQSFIERMTNFDKNLPNEKVLPKHSLLYEYFTVYNELTKVKYVTEGMRKPAFLSGEQKKAIVDLLFKTNRKVTVKQLKEDYFKKIECFDSVEISGVEDRFNASLGTYHDLLKIIKDKDFLDNEENEDILEDIVLTLTLFEDREMIEERLKTYAHLFDDKVMKQLKRRRYTGWGRLSRKLINGIRDKQSGKTILDFLKSDGFANRNFMQLIHDDSLTFKEDIQKAQVSGQGDSLHEHIANLAGSPAIKKGILQTVKVVDELVKVMGRHKPENIVIEMARENQTTQKGQKNSRERMKRIEEGIKELGSQILKEHPVENTQLQNEKLYLYYLQNGRDMYVDQELDINRLSDYDVDHIVPQSFLKDDSIDNKVLTRSDKNRGKSDNVPSEEVVKKMKNYWRQLLNAKLITQRKFDNLTKAERGGLSELDKAGFIKRQLVETRQITKHVAQILDSRMNTKYDENDKLIREVKVITLKSKLVSDFRKDFQFYKVREINNYHHAHDAYLNAVVGTALIKKYPKLESEFVYGDYKVYDVRKMIAKSEQEIGKATAKYFFYSNIMNFFKTEITLANGEIRKRPLIETNGETGEIVWDKGRDFATVRKVLSMPQVNIVKKTEVQTGGFSKESILPKRNSDKLIARKKDWDPKKYGGFDSPTVAYSVLVVAKVEKGKSKKLKSVKELLGITIMERSSFEKNPIDFLEAKGYKEVKKDLIIKLPKYSLFELENGRKRMLASAGELQKGNELALPSKYVNFLYLASHYEKLKGSPEDNEQKQLFVEQHKHYLDEIIEQISEFSKRVILADANLDKVLSAYNKHRDKPIREQAENIIHLFTLTNLGAPAAFKYFDTTIDRKRYTSTKEVLDATLIHQSITGLYETRIDLSQLGGDAGDMRAANLWPSPLMIKRSKKNSLALSLTADQMVSALLDAEPPILYSEYDPTRPFSEASMMGLLTNLADRELVHMINWAKRVPGFVDLTLHDQVHLLECAWLEILMIGLVWRSMEHPVKLLFAPNLLLDRNQGKCVEGMVEIFDMLLATSSRFRMMNLQGEEFVCLKSIILLNSGVYTFLSSTLKSLEEKDHIHRVLDKITDTLIHLMAKAGLTLQQQHQRLAQLLLILSHIRHMSNKGMEHLYSMKCKNVVPLYDLLLEAADAHRLHAPTSRGGASVEETDQSHLATAGSTSSHSLQKYYITGEAEGFPATA

SEQ ID NO: 356 - protein, 2333 aa, Artificial Sequence
  Cas9 variant 22 linkers
SRADPKKKRKVTGGGSAGDMRAANLWPSPLMIKRSKKNSLALSLTADQMVSALLDAEPPILYSEYDPTRPFSEASMMGLLTNLADRELVHMINWAKRVPGFVDLTLHDQVHLLECAWLEILMIGLVWRSMEHPVKLLFAPNLLLDRNQGKCVEGMVEIFDMLLATSSRFRMMNLQGEEFVCLKSIILLNSGVYTFLSSTLKSLEEKDHIHRVLDKITDTLIHLMAKAGLTLQQQHQRLAQLLLILSHIRHMSNKGMEHLYSMKCKNVVPLYDLLLEAADAHRLHAPTSRGGASVEETDQSHLATAGSTSSHSLQKYYITGEAEGFPATAPRGGSAGDMRAANLWPSPLMIKRSKKNSLALSLTADQMVSALLDAEPPILYSEYDPTRPFSEASMMGLLTNLADRELVHMINWAKRVPGFVDLTLHDQVHLLECAWLEILMIGLVWRSMEHPVKLLFAPNLLLDRNQGKCVEGMVEIFDMLLATSSRFRMMNLQGEEFVCLKSIILLNSGVYTFLSSTLKSLEEKDHIHRVLDKITDTLIHLMAKAGLTLQQQHQRLAQLLLILSHIRHMSNKGMEHLYSMKCKNVVPLYDLLLEAADAHRLHAPTSRGGASVEETDQSHLATAGSTSSHSLQKYYITGEAEGFPATATPESGADKKYSIGLDIGTNSVGWAVITDEYKVPSKKFKVLGNTDRHSIKKNLIGALLFDSGETAEATRLKRTARRRYTRRKNRICYLQEIFSNEMAKVDDSFFHRLEESFLVEEDKKHERHPIFGNIVDEVAYHEKYPTIYHLRKKLVDSTDKADLRLIYLALAHMIKFRGHFLIEGDLNPDNSDVDKLFIQLVQTYNQLFEENPINASGVDAKAILSARLSKSRRLENLIAQLPGEKKNGLFGNLIALSLGLTPNFKSNFDLAEDAKLQLSKDTYDDDLDNLLAQIGDQYADLFLAAKNLSDAILLSDILRVNTEITKAPLSASMIKRYDEHHQDLTLLKALVRQQLPEKYKEIFFDQSKNGYAGYIDGGASQEEFYKFIKPILEKMDGTEELLVKLNREDLLRKQRTFDNGSIPHQIHLGELHAILRRQEDFYPFLKDNREKIEKILTFRIPYYVGPLARGNSRFAWMTRKSEETITPWNFEEVVDKGASAQSFIERMTNFDKNLPNEKVLPKHSLLYEYFTVYNELTKVKYVTEGMRKPAFLSGEQKKAIVDLLFKTNRKVTVKQLKEDYFKKIECFDSVEISGVEDRFNASLGTYHDLLKIIKDKDFLDNEENEDILEDIVLTLTLFEDREMIEERLKTYAHLFDDKVMKQLKRRRYTGWGRLSRKLINGIRDKQSGKTILDFLKSDGFANRNFMQLIHDDSLTFKEDIQKAQVSGQGDSLHEHIANLAGSPAIKKGILQTVKVVDELVKVMGRHKPENIVIEMARENQTTQKGQKNSRERMKRIEEGIKELGSQILKEHPVENTQLQNEKLYLYYLQNGRDMYVDQELDINRLSDYDVDHIVPQSFLKDDSIDNKVLTRSDKNRGKSDNVPSEEVVKKMKNYWRQLLNAKLITQRKFDNLTKAERGGLSELDKAGFIKRQLVETRQITKHVAQILDSRMNTKYDENDKLIREVKVITLKSKLVSDFRKDFQFYKVREINNYHHAHDAYLNAVVGTALIKKYPKLESEFVYGDYKVYDVRKMIAKSEQEIGKATAKYFFYSNIMNFFKTEITLANGEIRKRPLIETNGETGEIVWDKGRDFATVRKVLSMPQVNIVKKTEVQTGGFSKESILPKRNSDKLIARKKDWDPKKYGGFDSPTVAYSVLVVAKVEKGKSKKLKSVKELLGITIMERSSFEKNPIDFLEAKGYKEVKKDLIIKLPKYSLFELENGRKRMLASAGELQKGNELALPSKYVNFLYLASHYEKLKGSPEDNEQKQLFVEQHKHYLDEIIEQISEFSKRVILADANLDKVLSAYNKHRDKPIREQAENIIHLFTLTNLGAPAAFKYFDTTIDRKRYTSTKEVLDATLIHQSITGLYETRIDLSQLGGDAGDMRAANLWPSPLMIKRSKKNSLALSLTADQMVSALLDAEPPILYSEYDPTRPFSEASMMGLLTNLADRELVHMINWAKRVPGFVDLTLHDQVHLLECAWLEILMIGLVWRSMEHPVKLLFAPNLLLDRNQGKCVEGMVEIFDMLLATSSRFRMMNLQGEEFVCLKSIILLNSGVYTFLSSTLKSLEEKDHIHRVLDKITDTLIHLMAKAGLTLQQQHQRLAQLLLILSHIRHMSNKGMEHLYSMKCKNVVPLYDLLLEAADAHRLHAPTSRGGASVEETDQSHLATAGSTSSHSLQKYYITGEAEGFPATA

SEQ ID NO: 357 - protein, 2336 aa, Artificial Sequence
  Cas9 variant 21 linkers
SRADPKKKRKVTGGGSAGDMRAANLWPSPLMIKRSKKNSLALSLTADQMVSALLDAEPPILYSEYDPTRPFSEASMMGLLTNLADRELVHMINWAKRVPGFVDLTLHDQVHLLECAWLEILMIGLVWRSMEHPVKLLFAPNLLLDRNQGKCVEGMVEIFDMLLATSSRFRMMNLQGEEFVCLKSIILLNSGVYTFLSSTLKSLEEKDHIHRVLDKITDTLIHLMAKAGLTLQQQHQRLAQLLLILSHIRHMSNKGMEHLYSMKCKNVVPLYDLLLEAADAHRLHAPTSRGGASVEETDQSHLATAGSTSSHSLQKYYITGEAEGFPATAGGSPRGGSAGDMRAANLWPSPLMIKRSKKNSLALSLTADQMVSALLDAEPPILYSEYDPTRPFSEASMMGLLTNLADRELVHMINWAKRVPGFVDLTLHDQVHLLECAWLEILMIGLVWRSMEHPVKLLFAPNLLLDRNQGKCVEGMVEIFDMLLATSSRFRMMNLQGEEFVCLKSIILLNSGVYTFLSSTLKSLEEKDHIHRVLDKITDTLIHLMAKAGLTLQQQHQRLAQLLLILSHIRHMSNKGMEHLYSMKCKNVVPLYDLLLEAADAHRLHAPTSRGGASVEETDQSHLATAGSTSSHSLQKYYITGEAEGFPATATPESGADKKYSIGLDIGTNSVGWAVITDEYKVPSKKFKVLGNTDRHSIKKNLIGALLFDSGETAEATRLKRTARRRYTRRKNRICYLQEIFSNEMAKVDDSFFHRLEESFLVEEDKKHERHPIFGNIVDEVAYHEKYPTIYHLRKKLVDSTDKADLRLIYLALAHMIKFRGHFLIEGDLNPDNSDVDKLFIQLVQTYNQLFEENPINASGVDAKAILSARLSKSRRLENLIAQLPGEKKNGLFGNLIALSLGLTPNFKSNFDLAEDAKLQLSKDTYDDDLDNLLAQIGDQYADLFLAAKNLSDAILLSDILRVNTEITKAPLSASMIKRYDEHHQDLTLLKALVRQQLPEKYKEIFFDQSKNGYAGYIDGGASQEEFYKFIKPILEKMDGTEELLVKLNREDLLRKQRTFDNGSIPHQIHLGELHAILRRQEDFYPFLKDNREKIEKILTFRIPYYVGPLARGNSRFAWMTRKSEETITPWNFEEVVDKGASAQSFIERMTNFDKNLPNEKVLPKHSLLYEYFTVYNELTKVKYVTEGMRKPAFLSGEQKKAIVDLLFKTNRKVTVKQLKEDYFKKIECFDSVEISGVEDRFNASLGTYHDLLKIIKDKDFLDNEENEDILEDIVLTLTLFEDREMIEERLKTYAHLFDDKVMKQLKRRRYTGWGRLSRKLINGIRDKQSGKTILDFLKSDGFANRNFMQLIHDDSLTFKEDIQKAQVSGQGDSLHEHIANLAGSPAIKKGILQTVKVVDELVKVMGRHKPENIVIEMARENQTTQKGQKNSRERMKRIEEGIKELGSQILKEHPVENTQLQNEKLYLYYLQNGRDMYVDQELDINRLSDYDVDHIVPQSFLKDDSIDNKVLTRSDKNRGKSDNVPSEEVVKKMKNYWRQLLNAKLITQRKFDNLTKAERGGLSELDKAGFIKRQLVETRQITKHVAQILDSRMNTKYDENDKLIREVKVITLKSKLVSDFRKDFQFYKVREINNYHHAHDAYLNAVVGTALIKKYPKLESEFVYGDYKVYDVRKMIAKSEQEIGKATAKYFFYSNIMNFFKTEITLANGEIRKRPLIETNGETGEIVWDKGRDFATVRKVLSMPQVNIVKKTEVQTGGFSKESILPKRNSDKLIARKKDWDPKKYGGFDSPTVAYSVLVVAKVEKGKSKKLKSVKELLGITIMERSSFEKNPIDFLEAKGYKEVKKDLIIKLPKYSLFELENGRKRMLASAGELQKGNELALPSKYVNFLYLASHYEKLKGSPEDNEQKQLFVEQHKHYLDEIIEQISEFSKRVILADANLDKVLSAYNKHRDKPIREQAENIIHLFTLTNLGAPAAFKYFDTTIDRKRYTSTKEVLDATLIHQSITGLYETRIDLSQLGGDAGDMRAANLWPSPLMIKRSKKNSLALSLTADQMVSALLDAEPPILYSEYDPTRPFSEASMMGLLTNLADRELVHMINWAKRVPGFVDLTLHDQVHLLECAWLEILMIGLVWRSMEHPVKLLFAPNLLLDRNQGKCVEGMVEIFDMLLATSSRFRMMNLQGEEFVCLKSIILLNSGVYTFLSSTLKSLEEKDHIHRVLDKITDTLIHLMAKAGLTLQQQHQRLAQLLLILSHIRHMSNKGMEHLYSMKCKNVVPLYDLLLEAADAHRLHAPTSRGGASVEETDQSHLATAGSTSSHSLQKYYITGEAEGFPATA

SEQ ID NO: 358 - protein, 2324 aa, Artificial Sequence
  Cas9 variant 23 linkers
SRADPKKKRKVTGAGDMRAANLWPSPLMIKRSKKNSLALSLTADQMVSALLDAEPPILYSEYDPTRPFSEASMMGLLTNLADRELVHMINWAKRVPGFVDLTLHDQVHLLECAWLEILMIGLVWRSMEHPVKLLFAPNLLLDRNQGKCVEGMVEIFDMLLATSSRFRMMNLQGEEFVCLKSIILLNSGVYTFLSSTLKSLEEKDHIHRVLDKITDTLIHLMAKAGLTLQQQHQRLAQLLLILSHIRHMSNKGMEHLYSMKCKNVVPLYDLLLEAADAHRLHAPTSRGGASVEETDQSHLATAGSTSSHSLQKYYITGEAEGFPATAGADKKYSIGLDIGTNSVGWAVITDEYKVPSKKFKVLGNTDRHSIKKNLIGALLFDSGETAEATRLKRTARRRYTRRKNRICYLQEIFSNEMAKVDDSFFHRLEESFLVEEDKKHERHPIFGNIVDEVAYHEKYPTIYHLRKKLVDSTDKADLRLIYLALAHMIKFRGHFLIEGDLNPDNSDVDKLFIQLVQTYNQLFEENPINASGVDAKAILSARLSKSRRLENLIAQLPGEKKNGLFGNLIALSLGLTPNFKSNFDLAEDAKLQLSKDTYDDDLDNLLAQIGDQYADLFLAAKNLSDAILLSDILRVNTEITKAPLSASMIKRYDEHHQDLTLLKALVRQQLPEKYKEIFFDQSKNGYAGYIDGGASQEEFYKFIKPILEKMDGTEELLVKLNREDLLRKQRTFDNGSIPHQIHLGELHAILRRQEDFYPFLKDNREKIEKILTFRIPYYVGPLARGNSRFAWMTRKSEETITPWNFEEVVDKGASAQSFIERMTNFDKNLPNEKVLPKHSLLYEYFTVYNELTKVKYVTEGMRKPAFLSGEQKKAIVDLLFKTNRKVTVKQLKEDYFKKIECFDSVEISGVEDRFNASLGTYHDLLKIIKDKDFLDNEENEDILEDIVLTLTLFEDREMIEERLKTYAHLFDDKVMKQLKRRRYTGWGRLSRKLINGIRDKQSGKTILDFLKSDGFANRNFMQLIHDDSLTFKEDIQKAQVSGQGDSLHEHIANLAGSPAIKKGILQTVKVVDELVKVMGRHKPENIVIEMARENQTTQKGQKNSRERMKRIEEGIKELGSQILKEHPVENTQLQNEKLYLYYLQNGRDMYVDQELDINRLSDYDVDHIVPQSFLKDDSIDNKVLTRSDKNRGKSDNVPSEEVVKKMKNYWRQLLNAKLITQRKFDNLTKAERGGLSELDKAGFIKRQLVETRQITKHVAQILDSRMNTKYDENDKLIREVKVITLKSKLVSDFRKDFQFYKVREINNYHHAHDAYLNAVVGTALIKKYPKLESEFVYGDYKVYDVRKMIAKSEQEIGKATAKYFFYSNIMNFFKTEITLANGEIRKRPLIETNGETGEIVWDKGRDFATVRKVLSMPQVNIVKKTEVQTGGFSKESILPKRNSDKLIARKKDWDPKKYGGFDSPTVAYSVLVVAKVEKGKSKKLKSVKELLGITIMERSSFEKNPIDFLEAKGYKEVKKDLIIKLPKYSLFELENGRKRMLASAGELQKGNELALPSKYVNFLYLASHYEKLKGSPEDNEQKQLFVEQHKHYLDEIIEQISEFSKRVILADANLDKVLSAYNKHRDKPIREQAENIIHLFTLTNLGAPAAFKYFDTTIDRKRYTSTKEVLDATLIHQSITGLYETRIDLSQLGGDAGDMRAANLWPSPLMIKRSKKNSLALSLTADQMVSALLDAEPPILYSEYDPTRPFSEASMMGLLTNLADRELVHMINWAKRVPGFVDLTLHDQVHLLECAWLEILMIGLVWRSMEHPVKLLFAPNLLLDRNQGKCVEGMVEIFDMLLATSSRFRMMNLQGEEFVCLKSIILLNSGVYTFLSSTLKSLEEKDHIHRVLDKITDTLIHLMAKAGLTLQQQHQRLAQLLLILSHIRHMSNKGMEHLYSMKCKNVVPLYDLLLEAADAHRLHAPTSRGGASVEETDQSHLATAGSTSSHSLQKYYITGEAEGFPATAPAGAGDMRAANLWPSPLMIKRSKKNSLALSLTADQMVSALLDAEPPILYSEYDPTRPFSEASMMGLLTNLADRELVHMINWAKRVPGFVDLTLHDQVHLLECAWLEILMIGLVWRSMEHPVKLLFAPNLLLDRNQGKCVEGMVEIFDMLLATSSRFRMMNLQGEEFVCLKSIILLNSGVYTFLSSTLKSLEEKDHIHRVLDKITDTLIHLMAKAGLTLQQQHQRLAQLLLILSHIRHMSNKGMEHLYSMKCKNVVPLYDLLLEAADAHRLHAPTSRGGASVEETDQSHLATAGSTSSHSLQKYYITGEAEGFPATA

SEQ ID NO: 359 - protein, 2327 aa, Artificial Sequence
  Cas9 variant 24 linkers
SRADPKKKRKVTGAGDMRAANLWPSPLMIKRSKKNSLALSLTADQMVSALLDAEPPILYSEYDPTRPFSEASMMGLLTNLADRELVHMINWAKRVPGFVDLTLHDQVHLLECAWLEILMIGLVWRSMEHPVKLLFAPNLLLDRNQGKCVEGMVEIFDMLLATSSRFRMMNLQGEEFVCLKSIILLNSGVYTFLSSTLKSLEEKDHIHRVLDKITDTLIHLMAKAGLTLQQQHQRLAQLLLILSHIRHMSNKGMEHLYSMKCKNVVPLYDLLLEAADAHRLHAPTSRGGASVEETDQSHLATAGSTSSHSLQKYYITGEAEGFPATAGADKKYSIGLDIGTNSVGWAVITDEYKVPSKKFKVLGNTDRHSIKKNLIGALLFDSGETAEATRLKRTARRRYTRRKNRICYLQEIFSNEMAKVDDSFFHRLEESFLVEEDKKHERHPIFGNIVDEVAYHEKYPTIYHLRKKLVDSTDKADLRLIYLALAHMIKFRGHFLIEGDLNPDNSDVDKLFIQLVQTYNQLFEENPINASGVDAKAILSARLSKSRRLENLIAQLPGEKKNGLFGNLIALSLGLTPNFKSNFDLAEDAKLQLSKDTYDDDLDNLLAQIGDQYADLFLAAKNLSDAILLSDILRVNTEITKAPLSASMIKRYDEHHQDLTLLKALVRQQLPEKYKEIFFDQSKNGYAGYIDGGASQEEFYKFIKPILEKMDGTEELLVKLNREDLLRKQRTFDNGSIPHQIHLGELHAILRRQEDFYPFLKDNREKIEKILTFRIPYYVGPLARGNSRFAWMTRKSEETITPWNFEEVVDKGASAQSFIERMTNFDKNLPNEKVLPKHSLLYEYFTVYNELTKVKYVTEGMRKPAFLSGEQKKAIVDLLFKTNRKVTVKQLKEDYFKKIECFDSVEISGVEDRFNASLGTYHDLLKIIKDKDFLDNEENEDILEDIVLTLTLFEDREMIEERLKTYAHLFDDKVMKQLKRRRYTGWGRLSRKLINGIRDKQSGKTILDFLKSDGFANRNFMQLIHDDSLTFKEDIQKAQVSGQGDSLHEHIANLAGSPAIKKGILQTVKVVDELVKVMGRHKPENIVIEMARENQTTQKGQKNSRERMKRIEEGIKELGSQILKEHPVENTQLQNEKLYLYYLQNGRDMYVDQELDINRLSDYDVDHIVPQSFLKDDSIDNKVLTRSDKNRGKSDNVPSEEVVKKMKNYWRQLLNAKLITQRKFDNLTKAERGGLSELDKAGFIKRQLVETRQITKHVAQILDSRMNTKYDENDKLIREVKVITLKSKLVSDFRKDFQFYKVREINNYHHAHDAYLNAVVGTALIKKYPKLESEFVYGDYKVYDVRKMIAKSEQEIGKATAKYFFYSNIMNFFKTEITLANGEIRKRPLIETNGETGEIVWDKGRDFATVRKVLSMPQVNIVKKTEVQTGGFSKESILPKRNSDKLIARKKDWDPKKYGGFDSPTVAYSVLVVAKVEKGKSKKLKSVKELLGITIMERSSFEKNPIDFLEAKGYKEVKKDLIIKLPKYSLFELENGRKRMLASAGELQKGNELALPSKYVNFLYLASHYEKLKGSPEDNEQKQLFVEQHKHYLDEIIEQISEFSKRVILADANLDKVLSAYNKHRDKPIREQAENIIHLFTLTNLGAPAAFKYFDTTIDRKRYTSTKEVLDATLIHQSITGLYETRIDLSQLGGDAGDMRAANLWPSPLMIKRSKKNSLALSLTADQMVSALLDAEPPILYSEYDPTRPFSEASMMGLLTNLADRELVHMINWAKRVPGFVDLTLHDQVHLLECAWLEILMIGLVWRSMEHPVKLLFAPNLLLDRNQGKCVEGMVEIFDMLLATSSRFRMMNLQGEEFVCLKSIILLNSGVYTFLSSTLKSLEEKDHIHRVLDKITDTLIHLMAKAGLTLQQQHQRLAQLLLILSHIRHMSNKGMEHLYSMKCKNVVPLYDLLLEAADAHRLHAPTSRGGASVEETDQSHLATAGSTSSHSLQKYYITGEAEGFPATAPAGGGSAGDMRAANLWPSPLMIKRSKKNSLALSLTADQMVSALLDAEPPILYSEYDPTRPFSEASMMGLLTNLADRELVHMINWAKRVPGFVDLTLHDQVHLLECAWLEILMIGLVWRSMEHPVKLLFAPNLLLDRNQGKCVEGMVEIFDMLLATSSRFRMMNLQGEEFVCLKSIILLNSGVYTFLSSTLKSLEEKDHIHRVLDKITDTLIHLMAKAGLTLQQQHQRLAQLLLILSHIRHMSNKGMEHLYSMKCKNVVPLYDLLLEAADAHRLHAPTSRGGASVEETDQSHLATAGSTSSHSLQKYYITGEAEGFPATA

SEQ ID NO: 360 - protein, 2021 aa, Artificial Sequence
  Cas9 variant 8 linkers
SRADPKKKRKVTGGGSAGDMRAANLWPSPLMIKRSKKNSLALSLTADQMVSALLDAEPPILYSEYDPTRPFSEASMMGLLTNLADRELVHMINWAKRVPGFVDLTLHDQVHLLECAWLEILMIGLVWRSMEHPVKLLFAPNLLLDRNQGKCVEGMVEIFDMLLATSSRFRMMNLQGEEFVCLKSIILLNSGVYTFLSSTLKSLEEKDHIHRVLDKITDTLIHLMAKAGLTLQQQHQRLAQLLLILSHIRHMSNKGMEHLYSMKCKNVVPLYDLLLEAADAHRLHAPTSRGGASVEETDQSHLATAGSTSSHSLQKYYITGEAEGFPATASGSETPGTPGGADKKYSIGLDIGTNSVGWAVITDEYKVPSKKFKVLGNTDRHSIKKNLIGALLFDSGETAEATRLKRTARRRYTRRKNRICYLQEIFSNEMAKVDDSFFHRLEESFLVEEDKKHERHPIFGNIVDEVAYHEKYPTIYHLRKKLVDSTDKADLRLIYLALAHMIKFRGHFLIEGDLNPDNSDVDKLFIQLVQTYNQLFEENPINASGVDAKAILSARLSKSRRLENLIAQLPGEKKNGLFGNLIALSLGLTPNFKSNFDLAEDAKLQLSKDTYDDDLDNLLAQIGDQYADLFLAAKNLSDAILLSDILRVNTEITKAPLSASMIKRYDEHHQDLTLLKALVRQQLPEKYKEIFFDQSKNGYAGYIDGGASQEEFYKFIKPILEKMDGTEELLVKLNREDLLRKQRTFDNGSIPHQIHLGELHAILRRQEDFYPFLKDNREKIEKILTFRIPYYVGPLARGNSRFAWMTRKSEETITPWNFEEVVDKGASAQSFIERMTNFDKNLPNEKVLPKHSLLYEYFTVYNELTKVKYVTEGMRKPAFLSGEQKKAIVDLLFKTNRKVTVKQLKEDYFKKIECFDSVEISGVEDRFNASLGTYHDLLKIIKDKDFLDNEENEDILEDIVLTLTLFEDREMIEERLKTYAHLFDDKVMKQLKRRRYTGWGRLSRKLINGIRDKQSGKTILDFLKSDGFANRNFMQLIHDDSLTFKEDIQKAQVSGQGDSLHEHIANLAGSPAIKKGILQTVKVVDELVKVMGRHKPENIVIEMARENQTTQKGQKNSRERMKRIEEGIKELGSQILKEHPVENTQLQNEKLYLYYLQNGRDMYVDQELDINRLSDYDVDHIVPQSFLKDDSIDNKVLTRSDKNRGKSDNVPSEEVVKKMKNYWRQLLNAKLITQRKFDNLTKAERGGLSELDKAGFIKRQLVETRQITKHVAQILDSRMNTKYDENDKLIREVKVITLKSKLVSDFRKDFQFYKVREINNYHHAHDAYLNAVVGTALIKKYPKLESEFVYGDYKVYDVRKMIAKSEQEIGKATAKYFFYSNIMNFFKTEITLANGEIRKRPLIETNGETGEIVWDKGRDFATVRKVLSMPQVNIVKKTEVQTGGFSKESILPKRNSDKLIARKKDWDPKKYGGFDSPTVAYSVLVVAKVEKGKSKKLKSVKELLGITIMERSSFEKNPIDFLEAKGYKEVKKDLIIKLPKYSLFELENGRKRMLASAGELQKGNELALPSKYVNFLYLASHYEKLKGSPEDNEQKQLFVEQHKHYLDEIIEQISEFSKRVILADANLDKVLSAYNKHRDKPIREQAENIIHLFTLTNLGAPAAFKYFDTTIDRKRYTSTKEVLDATLIHQSITGLYETRIDLSQLGGDAGDMRAANLWPSPLMIKRSKKNSLALSLTADQMVSALLDAEPPILYSEYDPTRPFSEASMMGLLTNLADRELVHMINWAKRVPGFVDLTLHDQVHLLECAWLEILMIGLVWRSMEHPVKLLFAPNLLLDRNQGKCVEGMVEIFDMLLATSSRFRMMNLQGEEFVCLKSIILLNSGVYTFLSSTLKSLEEKDHIHRVLDKITDTLIHLMAKAGLTLQQQHQRLAQLLLILSHIRHMSNKGMEHLYSMKCKNVVPLYDLLLEAADAHRLHAPTSRGGASVEETDQSHLATAGSTSSHSLQKYYITGEAEGFPATA

SEQ ID NO: 361 - protein, 2649 aa, Artificial Sequence
  Cas9 variant 27 linkers
SRADPKKKRKVTGGGSAGDMRAANLWPSPLMIKRSKKNSLALSLTADQMVSALLDAEPPILYSEYDPTRPFSEASMMGLLTNLADRELVHMINWAKRVPGFVDLTLHDQVHLLECAWLEILMIGLVWRSMEHPVKLLFAPNLLLDRNQGKCVEGMVEIFDMLLATSSRFRMMNLQGEEFVCLKSIILLNSGVYTFLSSTLKSLEEKDHIHRVLDKITDTLIHLMAKAGLTLQQQHQRLAQLLLILSHIRHMSNKGMEHLYSMKCKNVVPLYDLLLEAADAHRLHAPTSRGGASVEETDQSHLATAGSTSSHSLQKYYITGEAEGFPATAPRGGSAGDMRAANLWPSPLMIKRSKKNSLALSLTADQMVSALLDAEPPILYSEYDPTRPFSEASMMGLLTNLADRELVHMINWAKRVPGFVDLTLHDQVHLLECAWLEILMIGLVWRSMEHPVKLLFAPNLLLDRNQGKCVEGMVEIFDMLLATSSRFRMMNLQGEEFVCLKSIILLNSGVYTFLSSTLKSLEEKDHIHRVLDKITDTLIHLMAKAGLTLQQQHQRLAQLLLILSHIRHMSNKGMEHLYSMKCKNVVPLYDLLLEAADAHRLHAPTSRGGASVEETDQSHLATAGSTSSHSLQKYYITGEAEGFPATATPESGADKKYSIGLDIGTNSVGWAVITDEYKVPSKKFKVLGNTDRHSIKKNLIGALLFDSGETAEATRLKRTARRRYTRRKNRICYLQEIFSNEMAKVDDSFFHRLEESFLVEEDKKHERHPIFGNIVDEVAYHEKYPTIYHLRKKLVDSTDKADLRLIYLALAHMIKFRGHFLIEGDLNPDNSDVDKLFIQLVQTYNQLFEENPINASGVDAKAILSARLSKSRRLENLIAQLPGEKKNGLFGNLIALSLGLTPNFKSNFDLAEDAKLQLSKDTYDDDLDNLLAQIGDQYADLFLAAKNLSDAILLSDILRVNTEITKAPLSASMIKRYDEHHQDLTLLKALVRQQLPEKYKEIFFDQSKNGYAGYIDGGASQEEFYKFIKPILEKMDGTEELLVKLNREDLLRKQRTFDNGSIPHQIHLGELHAILRRQEDFYPFLKDNREKIEKILTFRIPYYVGPLARGNSRFAWMTRKSEETITPWNFEEVVDKGASAQSFIERMTNFDKNLPNEKVLPKHSLLYEYFTVYNELTKVKYVTEGMRKPAFLSGEQKKAIVDLLFKTNRKVTVKQLKEDYFKKIECFDSVEISGVEDRFNASLGTYHDLLKIIKDKDFLDNEENEDILEDIVLTLTLFEDREMIEERLKTYAHLFDDKVMKQLKRRRYTGWGRLSRKLINGIRDKQSGKTILDFLKSDGFANRNFMQLIHDDSLTFKEDIQKAQVSGQGDSLHEHIANLAGSPAIKKGILQTVKVVDELVKVMGRHKPENIVIEMARENQTTQKGQKNSRERMKRIEEGIKELGSQILKEHPVENTQLQNEKLYLYYLQNGRDMYVDQELDINRLSDYDVDHIVPQSFLKDDSIDNKVLTRSDKNRGKSDNVPSEEVVKKMKNYWRQLLNAKLITQRKFDNLTKAERGGLSELDKAGFIKRQLVETRQITKHVAQILDSRMNTKYDENDKLIREVKVITLKSKLVSDFRKDFQFYKVREINNYHHAHDAYLNAVVGTALIKKYPKLESEFVYGDYKVYDVRKMIAKSEQEIGKATAKYFFYSNIMNFFKTEITLANGEIRKRPLIETNGETGEIVWDKGRDFATVRKVLSMPQVNIVKKTEVQTGGFSKESILPKRNSDKLIARKKDWDPKKYGGFDSPTVAYSVLVVAKVEKGKSKKLKSVKELLGITIMERSSFEKNPIDFLEAKGYKEVKKDLIIKLPKYSLFELENGRKRMLASAGELQKGNELALPSKYVNFLYLASHYEKLKGSPEDNEQKQLFVEQHKHYLDEIIEQISEFSKRVILADANLDKVLSAYNKHRDKPIREQAENIIHLFTLTNLGAPAAFKYFDTTIDRKRYTSTKEVLDATLIHQSITGLYETRIDLSQLGGDAGDMRAANLWPSPLMIKRSKKNSLALSLTADQMVSALLDAEPPILYSEYDPTRPFSEASMMGLLTNLADRELVHMINWAKRVPGFVDLTLHDQVHLLECAWLEILMIGLVWRSMEHPVKLLFAPNLLLDRNQGKCVEGMVEIFDMLLATSSRFRMMNLQGEEFVCLKSIILLNSGVYTFLSSTLKSLEEKDHIHRVLDKITDTLIHLMAKAGLTLQQQHQRLAQLLLILSHIRHMSNKGMEHLYSMKCKNVVPLYDLLLEAADAHRLHAPTSRGGASVEETDQSHLATAGSTSSHSLQKYYITGEAEGFPATAPAGAGDMRAANLWPSPLMIKRSKKNSLALSLTADQMVSALLDAEPPILYSEYDPTRPFSEASMMGLLTNLADRELVHMINWAKRVPGFVDLTLHDQVHLLECAWLEILMIGLVWRSMEHPVKLLFAPNLLLDRNQGKCVEGMVEIFDMLLATSSRFRMMNLQGEEFVCLKSIILLNSGVYTFLSSTLKSLEEKDHIHRVLDKITDTLIHLMAKAGLTLQQQHQRLAQLLLILSHIRHMSNKGMEHLYSMKCKNVVPLYDLLLEAADAHRLHAPTSRGGASVEETDQSHLATAGSTSSHSLQKYYITGEAEGFPATA

SEQ ID NO: 362 - protein, 2649 aa, Artificial Sequence
  Cas9 variant 30 linkers (iCas)
  misc_feature (2017)..(2017): Xaa can be any naturally occurring amino acid
SRADPKKKRKVTGGGSAGDMRAANLWPSPLMIKRSKKNSLALSLTADQMVSALLDAEPPILYSEYDPTRPFSEASMMGLLTNLADRELVHMINWAKRVPGFVDLTLHDQVHLLECAWLEILMIGLVWRSMEHPVKLLFAPNLLLDRNQGKCVEGMVEIFDMLLATSSRFRMMNLQGEEFVCLKSIILLNSGVYTFLSSTLKSLEEKDHIHRVLDKITDTLIHLMAKAGLTLQQQHQRLAQLLLILSHIRHMSNKGMEHLYSMKCKNVVPLYDLLLEAADAHRLHAPTSRGGASVEETDQSHLATAGSTSSHSLQKYYITGEAEGFPATAPRAGDMRAANLWPSPLMIKRSKKNSLALSLTADQMVSALLDAEPPILYSEYDPTRPFSEASMMGLLTNLADRELVHMINWAKRVPGFVDLTLHDQVHLLECAWLEILMIGLVWRSMEHPVKLLFAPNLLLDRNQGKCVEGMVEIFDMLLATSSRFRMMNLQGEEFVCLKSIILLNSGVYTFLSSTLKSLEEKDHIHRVLDKITDTLIHLMAKAGLTLQQQHQRLAQLLLILSHIRHMSNKGMEHLYSMKCKNVVPLYDLLLEAADAHRLHAPTSRGGASVEETDQSHLATAGSTSSHSLQKYYITGEAEGFPATATPESGDKKYSIGLDIGTNSVGWAVITDEYKVPSKKFKVLGNTDRHSIKKNLIGALLFDSGETAEATRLKRTARRRYTRRKNRICYLQEIFSNEMAKVDDSFFHRLEESFLVEEDKKHERHPIFGNIVDEVAYHEKYPTIYHLRKKLVDSTDKADLRLIYLALAHMIKFRGHFLIEGDLNPDNSDVDKLFIQLVQTYNQLFEENPINASGVDAKAILSARLSKSRRLENLIAQLPGEKKNGLFGNLIALSLGLTPNFKSNFDLAEDAKLQLSKDTYDDDLDNLLAQIGDQYADLFLAAKNLSDAILLSDILRVNTEITKAPLSASMIKRYDEHHQDLTLLKALVRQQLPEKYKEIFFDQSKNGYAGYIDGGASQEEFYKFIKPILEKMDGTEELLVKLNREDLLRKQRTFDNGSIPHQIHLGELHAILRRQEDFYPFLKDNREKIEKILTFRIPYYVGPLARGNSRFAWMTRKSEETITPWNFEEVVDKGASAQSFIERMTNFDKNLPNEKVLPKHSLLYEYFTVYNELTKVKYVTEGMRKPAFLSGEQKKAIVDLLFKTNRKVTVKQLKEDYFKKIECFDSVEISGVEDRFNASLGTYHDLLKIIKDKDFLDNEENEDILEDIVLTLTLFEDREMIEERLKTYAHLFDDKVMKQLKRRRYTGWGRLSRKLINGIRDKQSGKTILDFLKSDGFANRNFMQLIHDDSLTFKEDIQKAQVSGQGDSLHEHIANLAGSPAIKKGILQTVKVVDELVKVMGRHKPENIVIEMARENQTTQKGQKNSRERMKRIEEGIKELGSQILKEHPVENTQLQNEKLYLYYLQNGRDMYVDQELDINRLSDYDVDHIVPQSFLKDDSIDNKVLTRSDKNRGKSDNVPSEEVVKKMKNYWRQLLNAKLITQRKFDNLTKAERGGLSELDKAGFIKRQLVETRQITKHVAQILDSRMNTKYDENDKLIREVKVITLKSKLVSDFRKDFQFYKVREINNYHHAHDAYLNAVVGTALIKKYPKLESEFVYGDYKVYDVRKMIAKSEQEIGKATAKYFFYSNIMNFFKTEITLANGEIRKRPLIETNGETGEIVWDKGRDFATVRKVLSMPQVNIVKKTEVQTGGFSKESILPKRNSDKLIARKKDWDPKKYGGFDSPTVAYSVLVVAKVEKGKSKKLKSVKELLGITIMERSSFEKNPIDFLEAKGYKEVKKDLIIKLPKYSLFELENGRKRMLASAGELQKGNELALPSKYVNFLYLASHYEKLKGSPEDNEQKQLFVEQHKHYLDEIIEQISEFSKRVILADANLDKVLSAYNKHRDKPIREQAENIIHLFTLTNLGAPAAFKYFDTTIDRKRYTSTKEVLDATLIHQSITGLYETRIDLSQLGGDXAGDMRAANLWPSPLMIKRSKKNSLALSLTADQMVSALLDAEPPILYSEYDPTRPFSEASMMGLLTNLADRELVHMINWAKRVPGFVDLTLHDQVHLLECAWLEILMIGLVWRSMEHPVKLLFAPNLLLDRNQGKCVEGMVEIFDMLLATSSRFRMMNLQGEEFVCLKSIILLNSGVYTFLSSTLKSLEEKDHIHRVLDKITDTLIHLMAKAGLTLQQQHQRLAQLLLILSHIRHMSNKGMEHLYSMKCKNVVPLYDLLLEAADAHRLHAPTSRGGASVEETDQSHLATAGSTSSHSLQKYYITGEAEGFPATAPAGGGSAGDMRAANLWPSPLMIKRSKKNSLALSLTADQMVSALLDAEPPILYSEYDPTRPFSEASMMGLLTNLADRELVHMINWAKRVPGFVDLTLHDQVHLLECAWLEILMIGLVWRSMEHPVKLLFAPNLLLDRNQGKCVEGMVEIFDMLLATSSRFRMMNLQGEEFVCLKSIILLNSGVYTFLSSTLKSLEEKDHIHRVLDKITDTLIHLMAKAGLTLQQQHQRLAQLLLILSHIRHMSNKGMEHLYSMKCKNVVPLYDLLLEAADAHRLHAPTSRGGASVEETDQSHLATAGSTSSHSLQKYYITGEAEGFPATA

SEQ ID NO: 363 - protein, 2652 aa, Artificial Sequence
  Cas9 variant 25 linkers
SRADPKKKRKVTGAGDMRAANLWPSPLMIKRSKKNSLALSLTADQMVSALLDAEPPILYSEYDPTRPFSEASMMGLLTNLADRELVHMINWAKRVPGFVDLTLHDQVHLLECAWLEILMIGLVWRSMEHPVKLLFAPNLLLDRNQGKCVEGMVEIFDMLLATSSRFRMMNLQGEEFVCLKSIILLNSGVYTFLSSTLKSLEEKDHIHRVLDKITDTLIHLMAKAGLTLQQQHQRLAQLLLILSHIRHMSNKGMEHLYSMKCKNVVPLYDLLLEAADAHRLHAPTSRGGASVEETDQSHLATAGSTSSHSLQKYYITGEAEGFPATAGGSPRGGSAGDMRAANLWPSPLMIKRSKKNSLALSLTADQMVSALLDAEPPILYSEYDPTRPFSEASMMGLLTNLADRELVHMINWAKRVPGFVDLTLHDQVHLLECAWLEILMIGLVWRSMEHPVKLLFAPNLLLDRNQGKCVEGMVEIFDMLLATSSRFRMMNLQGEEFVCLKSIILLNSGVYTFLSSTLKSLEEKDHIHRVLDKITDTLIHLMAKAGLTLQQQHQRLAQLLLILSHIRHMSNKGMEHLYSMKCKNVVPLYDLLLEAADAHRLHAPTSRGGASVEETDQSHLATAGSTSSHSLQKYYITGEAEGFPATATPESGADKKYSIGLDIGTNSVGWAVITDEYKVPSKKFKVLGNTDRHSIKKNLIGALLFDSGETAEATRLKRTARRRYTRRKNRICYLQEIFSNEMAKVDDSFFHRLEESFLVEEDKKHERHPIFGNIVDEVAYHEKYPTIYHLRKKLVDSTDKADLRLIYLALAHMIKFRGHFLIEGDLNPDNSDVDKLFIQLVQTYNQLFEENPINASGVDAKAILSARLSKSRRLENLIAQLPGEKKNGLFGNLIALSLGLTPNFKSNFDLAEDAKLQLSKDTYDDDLDNLLAQIGDQYADLFLAAKNLSDAILLSDILRVNTEITKAPLSASMIKRYDEHHQDLTLLKALVRQQLPEKYKEIFFDQSKNGYAGYIDGGASQEEFYKFIKPILEKMDGTEELLVKLNREDLLRKQRTFDNGSIPHQIHLGELHAILRRQEDFYPFLKDNREKIEKILTFRIPYYVGPLARGNSRFAWMTRKSEETITPWNFEEVVDKGASAQSFIERMTNFDKNLPNEKVLPKHSLLYEYFTVYNELTKVKYVTEGMRKPAFLSGEQKKAIVDLLFKTNRKVTVKQLKEDYFKKIECFDSVEISGVEDRFNASLGTYHDLLKIIKDKDFLDNEENEDILEDIVLTLTLFEDREMIEERLKTYAHLFDDKVMKQLKRRRYTGWGRLSRKLINGIRDKQSGKTILDFLKSDGFANRNFMQLIHDDSLTFKEDIQKAQVSGQGDSLHEHIANLAGSPAIKKGILQTVKVVDELVKVMGRHKPENIVIEMARENQTTQKGQKNSRERMKRIEEGIKELGSQILKEHPVENTQLQNEKLYLYYLQNGRDMYVDQELDINRLSDYDVDHIVPQSFLKDDSIDNKVLTRSDKNRGKSDNVPSEEVVKKMKNYWRQLLNAKLITQRKFDNLTKAERGGLSELDKAGFIKRQLVETRQITKHVAQILDSRMNTKYDENDKLIREVKVITLKSKLVSDFRKDFQFYKVREINNYHHAHDAYLNAVVGTALIKKYPKLESEFVYGDYKVYDVRKMIAKSEQEIGKATAKYFFYSNIMNFFKTEITLANGEIRKRPLIETNGETGEIVWDKGRDFATVRKVLSMPQVNIVKKTEVQTGGFSKESILPKRNSDKLIARKKDWDPKKYGGFDSPTVAYSVLVVAKVEKGKSKKLKSVKELLGITIMERSSFEKNPIDFLEAKGYKEVKKDLIIKLPKYSLFELENGRKRMLASAGELQKGNELALPSKYVNFLYLASHYEKLKGSPEDNEQKQLFVEQHKHYLDEIIEQISEFSKRVILADANLDKVLSAYNKHRDKPIREQAENIIHLFTLTNLGAPAAFKYFDTTIDRKRYTSTKEVLDATLIHQSITGLYETRIDLSQLGGDAGDMRAANLWPSPLMIKRSKKNSLALSLTADQMVSALLDAEPPILYSEYDPTRPFSEASMMGLLTNLADRELVHMINWAKRVPGFVDLTLHDQVHLLECAWLEILMIGLVWRSMEHPVKLLFAPNLLLDRNQGKCVEGMVEIFDMLLATSSRFRMMNLQGEEFVCLKSIILLNSGVYTFLSSTLKSLEEKDHIHRVLDKITDTLIHLMAKAGLTLQQQHQRLAQLLLILSHIRHMSNKGMEHLYSMKCKNVVPLYDLLLEAADAHRLHAPTSRGGASVEETDQSHLATAGSTSSHSLQKYYITGEAEGFPATAPAGGGSAGDMRAANLWPSPLMIKRSKKNSLALSLTADQMVSALLDAEPPILYSEYDPTRPFSEASMMGLLTNLADRELVHMINWAKRVPGFVDLTLHDQVHLLECAWLEILMIGLVWRSMEHPVKLLFAPNLLLDRNQGKCVEGMVEIFDMLLATSSRFRMMNLQGEEFVCLKSIILLNSGVYTFLSSTLKSLEEKDHIHRVLDKITDTLIHLMAKAGLTLQQQHQRLAQLLLILSHIRHMSNKGMEHLYSMKCKNVVPLYDLLLEAADAHRLHAPTSRGGASVEETDQSHLATAGSTSSHSLQKYYITGEAEGFPATA

SEQ ID NO: 364 - protein, 2653 aa, Artificial Sequence
  Cas9 variant 28 linkers
SRADPKKKRKVTGGGSAGDMRAANLWPSPLMIKRSKKNSLALSLTADQMVSALLDAEPPILYSEYDPTRPFSEASMMGLLTNLADRELVHMINWAKRVPGFVDLTLHDQVHLLECAWLEILMIGLVWRSMEHPVKLLFAPNLLLDRNQGKCVEGMVEIFDMLLATSSRFRMMNLQGEEFVCLKSIILLNSGVYTFLSSTLKSLEEKDHIHRVLDKITDTLIHLMAKAGLTLQQQHQRLAQLLLILSHIRHMSNKGMEHLYSMKCKNVVPLYDLLLEAADAHRLHAPTSRGGASVEETDQSHLATAGSTSSHSLQKYYITGEAEGFPATATPGGPRGGSAGDMRAANLWPSPLMIKRSKKNSLALSLTADQMVSALLDAEPPILYSEYDPTRPFSEASMMGLLTNLADRELVHMINWAKRVPGFVDLTLHDQVHLLECAWLEILMIGLVWRSMEHPVKLLFAPNLLLDRNQGKCVEGMVEIFDMLLATSSRFRMMNLQGEEFVCLKSIILLNSGVYTFLSSTLKSLEEKDHIHRVLDKITDTLIHLMAKAGLTLQQQHQRLAQLLLILSHIRHMSNKGMEHLYSMKCKNVVPLYDLLLEAADAHRLHAPTSRGGASVEETDQSHLATAGSTSSHSLQKYYITGEAEGFPATATPESGADKKYSIGLDIGTNSVGWAVITDEYKVPSKKFKVLGNTDRHSIKKNLIGALLFDSGETAEATRLKRTARRRYTRRKNRICYLQEIFSNEMAKVDDSFFHRLEESFLVEEDKKHERHPIFGNIVDEVAYHEKYPTIYHLRKKLVDSTDKADLRLIYLALAHMIKFRGHFLIEGDLNPDNSDVDKLFIQLVQTYNQLFEENPINASGVDAKAILSARLSKSRRLENLIAQLPGEKKNGLFGNLIALSLGLTPNFKSNFDLAEDAKLQLSKDTYDDDLDNLLAQIGDQYADLFLAAKNLSDAILLSDILRVNTEITKAPLSASMIKRYDEHHQDLTLLKALVRQQLPEKYKEIFFDQSKNGYAGYIDGGASQEEFYKFIKPILEKMDGTEELLVKLNREDLLRKQRTFDNGSIPHQIHLGELHAILRRQEDFYPFLKDNREKIEKILTFRIPYYVGPLARGNSRFAWMTRKSEETITPWNFEEVVDKGASAQSFIERMTNFDKNLPNEKVLPKHSLLYEYFTVYNELTKVKYVTEGMRKPAFLSGEQKKAIVDLLFKTNRKVTVKQLKEDYFKKIECFDSVEISGVEDRFNASLGTYHDLLKIIKDKDFLDNEENEDILEDIVLTLTLFEDREMIEERLKTYAHLFDDKVMKQLKRRRYTGWGRLSRKLINGIRDKQSGKTILDFLKSDGFANRNFMQLIHDDSLTFKEDIQKAQVSGQGDSLHEHIANLAGSPAIKKGILQTVKVVDELVKVMGRHKPENIVIEMARENQTTQKGQKNSRERMKRIEEGIKELGSQILKEHPVENTQLQNEKLYLYYLQNGRDMYVDQELDINRLSDYDVDHIVPQSFLKDDSIDNKVLTRSDKNRGKSDNVPSEEVVKKMKNYWRQLLNAKLITQRKFDNLTKAERGGLSELDKAGFIKRQLVETRQITKHVAQILDSRMNTKYDENDKLIREVKVITLKSKLVSDFRKDFQFYKVREINNYHHAHDAYLNAVVGTALIKKYPKLESEFVYGDYKVYDVRKMIAKSEQEIGKATAKYFFYSNIMNFFKTEITLANGEIRKRPLIETNGETGEIVWDKGRDFATVRKVLSMPQVNIVKKTEVQTGGFSKESILPKRNSDKLIARKKDWDPKKYGGFDSPTVAYSVLVVAKVEKGKSKKLKSVKELLGITIMERSSFEKNPIDFLEAKGYKEVKKDLIIKLPKYSLFELENGRKRMLASAGELQKGNELALPSKYVNFLYLASHYEKLKGSPEDNEQKQLFVEQHKHYLDEIIEQISEFSKRVILADANLDKVLSAYNKHRDKPIREQAENIIHLFTLTNLGAPAAFKYFDTTIDRKRYTSTKEVLDATLIHQSITGLYETRIDLSQLGGDAGDMRAANLWPSPLMIKRSKKNSLALSLTADQMVSALLDAEPPILYSEYDPTRPFSEASMMGLLTNLADRELVHMINWAKRVPGFVDLTLHDQVHLLECAWLEILMIGLVWRSMEHPVKLLFAPNLLLDRNQGKCVEGMVEIFDMLLATSSRFRMMNLQGEEFVCLKSIILLNSGVYTFLSSTLKSLEEKDHIHRVLDKITDTLIHLMAKAGLTLQQQHQRLAQLLLILSHIRHMSNKGMEHLYSMKCKNVVPLYDLLLEAADAHRLHAPTSRGGASVEETDQSHLATAGSTSSHSLQKYYITGEAEGFPATAPAGAGDMRAANLWPSPLMIKRSKKNSLALSLTADQMVSALLDAEPPILYSEYDPTRPFSEASMMGLLTNLADRELVHMINWAKRVPGFVDLTLHDQVHLLECAWLEILMIGLVWRSMEHPVKLLFAPNLLLDRNQGKCVEGMVEIFDMLLATSSRFRMMNLQGEEFVCLKSIILLNSGVYTFLSSTLKSLEEKDHIHRVLDKITDTLIHLMAKAGLTLQQQHQRLAQLLLILSHIRHMSNKGMEHLYSMKCKNVVPLYDLLLEAADAHRLHAPTSRGGASVEETDQSHLATAGSTSSHSLQKYYITGEAEGFPATA

SEQ ID NO: 365 - protein, 2656 aa, Artificial Sequence
  Cas9 variant 26 linkers
SRADPKKKRKVTGGGSAGDMRAANLWPSPLMIKRSKKNSLALSLTADQMVSALLDAEPPILYSEYDPTRPFSEASMMGLLTNLADRELVHMINWAKRVPGFVDLTLHDQVHLLECAWLEILMIGLVWRSMEHPVKLLFAPNLLLDRNQGKCVEGMVEIFDMLLATSSRFRMMNLQGEEFVCLKSIILLNSGVYTFLSSTLKSLEEKDHIHRVLDKITDTLIHLMAKAGLTLQQQHQRLAQLLLILSHIRHMSNKGMEHLYSMKCKNVVPLYDLLLEAADAHRLHAPTSRGGASVEETDQSHLATAGSTSSHSLQKYYITGEAEGFPATATPGGPRGGSAGDMRAANLWPSPLMIKRSKKNSLALSLTADQMVSALLDAEPPILYSEYDPTRPFSEASMMGLLTNLADRELVHMINWAKRVPGFVDLTLHDQVHLLECAWLEILMIGLVWRSMEHPVKLLFAPNLLLDRNQGKCVEGMVEIFDMLLATSSRFRMMNLQGEEFVCLKSIILLNSGVYTFLSSTLKSLEEKDHIHRVLDKITDTLIHLMAKAGLTLQQQHQRLAQLLLILSHIRHMSNKGMEHLYSMKCKNVVPLYDLLLEAADAHRLHAPTSRGGASVEETDQSHLATAGSTSSHSLQKYYITGEAEGFPATATPESGADKKYSIGLDIGTNSVGWAVITDEYKVPSKKFKVLGNTDRHSIKKNLIGALLFDSGETAEATRLKRTARRRYTRRKNRICYLQEIFSNEMAKVDDSFFHRLEESFLVEEDKKHERHPIFGNIVDEVAYHEKYPTIYHLRKKLVDSTDKADLRLIYLALAHMIKFRGHFLIEGDLNPDNSDVDKLFIQLVQTYNQLFEENPINASGVDAKAILSARLSKSRRLENLIAQLPGEKKNGLFGNLIALSLGLTPNFKSNFDLAEDAKLQLSKDTYDDDLDNLLAQIGDQYADLFLAAKNLSDAILLSDILRVNTEITKAPLSASMIKRYDEHHQDLTLLKALVRQQLPEKYKEIFFDQSKNGYAGYIDGGASQEEFYKFIKPILEKMDGTEELLVKLNREDLLRKQRTFDNGSIPHQIHLGELHAILRRQEDFYPFLKDNREKIEKILTFRIPYYVGPLARGNSRFAWMTRKSEETITPWNFEEVVDKGASAQSFIERMTNFDKNLPNEKVLPKHSLLYEYFTVYNELTKVKYVTEGMRKPAFLSGEQKKAIVDLLFKTNRKVTVKQLKEDYFKKIECFDSVEISGVEDRFNASLGTYHDLLKIIKDKDFLDNEENEDILEDIVLTLTLFEDREMIEERLKTYAHLFDDKVMKQLKRRRYTGWGRLSRKLINGIRDKQSGKTILDFLKSDGFANRNFMQLIHDDSLTFKEDIQKAQVSGQGDSLHEHIANLAGSPAIKKGILQTVKVVDELVKVMGRHKPENIVIEMARENQTTQKGQKNSRERMKRIEEGIKELGSQILKEHPVENTQLQNEKLYLYYLQNGRDMYVDQELDINRLSDYDVDHIVPQSFLKDDSIDNKVLTRSDKNRGKSDNVPSEEVVKKMKNYWRQLLNAKLITQRKFDNLTKAERGGLSELDKAGFIKRQLVETRQITKHVAQILDSRMNTKYDENDKLIREVKVITLKSKLVSDFRKDFQFYKVREINNYHHAHDAYLNAVVGTALIKKYPKLESEFVYGDYKVYDVRKMIAKSEQEIGKATAKYFFYSNIMNFFKTEITLANGEIRKRPLIETNGETGEIVWDKGRDFATVRKVLSMPQVNIVKKTEVQTGGFSKESILPKRNSDKLIARKKDWDPKKYGGFDSPTVAYSVLVVAKVEKGKSKKLKSVKELLGITIMERSSFEKNPIDFLEAKGYKEVKKDLIIKLPKYSLFELENGRKRMLASAGELQKGNELALPSKYVNFLYLASHYEKLKGSPEDNEQKQLFVEQHKHYLDEIIEQISEFSKRVILADANLDKVLSAYNKHRDKPIREQAENIIHLFTLTNLGAPAAFKYFDTTIDRKRYTSTKEVLDATLIHQSITGLYETRIDLSQLGGDAGDMRAANLWPSPLMIKRSKKNSLALSLTADQMVSALLDAEPPILYSEYDPTRPFSEASMMGLLTNLADRELVHMINWAKRVPGFVDLTLHDQVHLLECAWLEILMIGLVWRSMEHPVKLLFAPNLLLDRNQGKCVEGMVEIFDMLLATSSRFRMMNLQGEEFVCLKSIILLNSGVYTFLSSTLKSLEEKDHIHRVLDKITDTLIHLMAKAGLTLQQQHQRLAQLLLILSHIRHMSNKGMEHLYSMKCKNVVPLYDLLLEAADAHRLHAPTSRGGASVEETDQSHLATAGSTSSHSLQKYYITGEAEGFPATAPAGGGSAGDMRAANLWPSPLMIKRSKKNSLALSLTADQMVSALLDAEPPILYSEYDPTRPFSEASMMGLLTNLADRELVHMINWAKRVPGFVDLTLHDQVHLLECAWLEILMIGLVWRSMEHPVKLLFAPNLLLDRNQGKCVEGMVEIFDMLLATSSRFRMMNLQGEEFVCLKSIILLNSGVYTFLSSTLKSLEEKDHIHRVLDKITDTLIHLMAKAGLTLQQQHQRLAQLLLILSHIRHMSNKGMEHLYSMKCKNVVPLYDLLLEAADAHRLHAPTSRGGASVEETDQSHLATAGSTSSHSLQKYYITGEAEGFPATA

SEQ ID NO: 366 - protein, 2015 aa, Artificial Sequence
  Cas9 variant 10 linkers
SRADPKKKRKVTGAGDMRAANLWPSPLMIKRSKKNSLALSLTADQMVSALLDAEPPILYSEYDPTRPFSEASMMGLLTNLADRELVHMINWAKRVPGFVDLTLHDQVHLLECAWLEILMIGLVWRSMEHPVKLLFAPNLLLDRNQGKCVEGMVEIFDMLLATSSRFRMMNLQGEEFVCLKSIILLNSGVYTFLSSTLKSLEEKDHIHRVLDKITDTLIHLMAKAGLTLQQQHQRLAQLLLILSHIRHMSNKGMEHLYSMKCKNVVPLYDLLLEAADAHRLHAPTSRGGASVEETDQSHLATAGSTSSHSLQKYYITGEAEGFPATATPESGPGGADKKYSIGLDIGTNSVGWAVITDEYKVPSKKFKVLGNTDRHSIKKNLIGALLFDSGETAEATRLKRTARRRYTRRKNRICYLQEIFSNEMAKVDDSFFHRLEESFLVEEDKKHERHPIFGNIVDEVAYHEKYPTIYHLRKKLVDSTDKADLRLIYLALAHMIKFRGHFLIEGDLNPDNSDVDKLFIQLVQTYNQLFEENPINASGVDAKAILSARLSKSRRLENLIAQLPGEKKNGLFGNLIALSLGLTPNFKSNFDLAEDAKLQLSKDTYDDDLDNLLAQIGDQYADLFLAAKNLSDAILLSDILRVNTEITKAPLSASMIKRYDEHHQDLTLLKALVRQQLPEKYKEIFFDQSKNGYAGYIDGGASQEEFYKFIKPILEKMDGTEELLVKLNREDLLRKQRTFDNGSIPHQIHLGELHAILRRQEDFYPFLKDNREKIEKILTFRIPYYVGPLARGNSRFAWMTRKSEETITPWNFEEVVDKGASAQSFIERMTNFDKNLPNEKVLPKHSLLYEYFTVYNELTKVKYVTEGMRKPAFLSGEQKKAIVDLLFKTNRKVTVKQLKEDYFKKIECFDSVEISGVEDRFNASLGTYHDLLKIIKDKDFLDNEENEDILEDIVLTLTLFEDREMIEERLKTYAHLFDDKVMKQLKRRRYTGWGRLSRKLINGIRDKQSGKTILDFLKSDGFANRNFMQLIHDDSLTFKEDIQKAQVSGQGDSLHEHIANLAGSPAIKKGILQTVKVVDELVKVMGRHKPENIVIEMARENQTTQKGQKNSRERMKRIEEGIKELGSQILKEHPVENTQLQNEKLYLYYLQNGRDMYVDQELDINRLSDYDVDHIVPQSFLKDDSIDNKVLTRSDKNRGKSDNVPSEEVVKKMKNYWRQLLNAKLITQRKFDNLTKAERGGLSELDKAGFIKRQLVETRQITKHVAQILDSRMNTKYDENDKLIREVKVITLKSKLVSDFRKDFQFYKVREINNYHHAHDAYLNAVVGTALIKKYPKLESEFVYGDYKVYDVRKMIAKSEQEIGKATAKYFFYSNIMNFFKTEITLANGEIRKRPLIETNGETGEIVWDKGRDFATVRKVLSMPQVNIVKKTEVQTGGFSKESILPKRNSDKLIARKKDWDPKKYGGFDSPTVAYSVLVVAKVEKGKSKKLKSVKELLGITIMERSSFEKNPIDFLEAKGYKEVKKDLIIKLPKYSLFELENGRKRMLASAGELQKGNELALPSKYVNFLYLASHYEKLKGSPEDNEQKQLFVEQHKHYLDEIIEQISEFSKRVILADANLDKVLSAYNKHRDKPIREQAENIIHLFTLTNLGAPAAFKYFDTTIDRKRYTSTKEVLDATLIHQSITGLYETRIDLSQLGGDAGDMRAANLWPSPLMIKRSKKNSLALSLTADQMVSALLDAEPPILYSEYDPTRPFSEASMMGLLTNLADRELVHMINWAKRVPGFVDLTLHDQVHLLECAWLEILMIGLVWRSMEHPVKLLFAPNLLLDRNQGKCVEGMVEIFDMLLATSSRFRMMNLQGEEFVCLKSIILLNSGVYTFLSSTLKSLEEKDHIHRVLDKITDTLIHLMAKAGLTLQQQHQRLAQLLLILSHIRHMSNKGMEHLYSMKCKNVVPLYDLLLEAADAHRLHAPTSRGGASVEETDQSHLATAGSTSSHSLQKYYITGEAEGFPATA

SEQ ID NO: 367 - protein, 2333 aa, Artificial Sequence
  Cas9 variant 20 linkers
SRADPKKKRKVTGAGDMRAANLWPSPLMIKRSKKNSLALSLTADQMVSALLDAEPPILYSEYDPTRPFSEASMMGLLTNLADRELVHMINWAKRVPGFVDLTLHDQVHLLECAWLEILMIGLVWRSMEHPVKLLFAPNLLLDRNQGKCVEGMVEIFDMLLATSSRFRMMNLQGEEFVCLKSIILLNSGVYTFLSSTLKSLEEKDHIHRVLDKITDTLIHLMAKAGLTLQQQHQRLAQLLLILSHIRHMSNKGMEHLYSMKCKNVVPLYDLLLEAADAHRLHAPTSRGGASVEETDQSHLATAGSTSSHSLQKYYITGEAEGFPATAGGSPRGGSAGDMRAANLWPSPLMIKRSKKNSLALSLTADQMVSALLDAEPPILYSEYDPTRPFSEASMMGLLTNLADRELVHMINWAKRVPGFVDLTLHDQVHLLECAWLEILMIGLVWRSMEHPVKLLFAPNLLLDRNQGKCVEGMVEIFDMLLATSSRFRMMNLQGEEFVCLKSIILLNSGVYTFLSSTLKSLEEKDHIHRVLDKITDTLIHLMAKAGLTLQQQHQRLAQLLLILSHIRHMSNKGMEHLYSMKCKNVVPLYDLLLEAADAHRLHAPTSRGGASVEETDQSHLATAGSTSSHSLQKYYITGEAEGFPATATPESGADKKYSIGLDIGTNSVGWAVITDEYKVPSKKFKVLGNTDRHSIKKNLIGALLFDSGETAEATRLKRTARRRYTRRKNRICYLQEIFSNEMAKVDDSFFHRLEESFLVEEDKKHERHPIFGNIVDEVAYHEKYPTIYHLRKKLVDSTDKADLRLIYLALAHMIKFRGHFLIEGDLNPDNSDVDKLFIQLVQTYNQLFEENPINASGVDAKAILSARLSKSRRLENLIAQLPGEKKNGLFGNLIALSLGLTPNFKSNFDLAEDAKLQLSKDTYDDDLDNLLAQIGDQYADLFLAAKNLSDAILLSDILRVNTEITKAPLSASMIKRYDEHHQDLTLLKALVRQQLPEKYKEIFFDQSKNGYAGYIDGGASQEEFYKFIKPILEKMDGTEELLVKLNREDLLRKQRTFDNGSIPHQIHLGELHAILRRQEDFYPFLKDNREKIEKILTFRIPYYVGPLARGNSRFAWMTRKSEETITPWNFEEVVDKGASAQSFIERMTNFDKNLPNEKVLPKHSLLYEYFTVYNELTKVKYVTEGMRKPAFLSGEQKKAIVDLLFKTNRKVTVKQLKEDYFKKIECFDSVEISGVEDRFNASLGTYHDLLKIIKDKDFLDNEENEDILEDIVLTLTLFEDREMIEERLKTYAHLFDDKVMKQLKRRRYTGWGRLSRKLINGIRDKQSGKTILDFLKSDGFANRNFMQLIHDDSLTFKEDIQKAQVSGQGDSLHEHIANLAGSPAIKKGILQTVKVVDELVKVMGRHKPENIVIEMARENQTTQKGQKNSRERMKRIEEGIKELGSQILKEHPVENTQLQNEKLYLYYLQNGRDMYVDQELDINRLSDYDVDHIVPQSFLKDDSIDNKVLTRSDKNRGKSDNVPSEEVVKKMKNYWRQLLNAKLITQRKFDNLTKAERGGLSELDKAGFIKRQLVETRQITKHVAQILDSRMNTKYDENDKLIREVKVITLKSKLVSDFRKDFQFYKVREINNYHHAHDAYLNAVVGTALIKKYPKLESEFVYGDYKVYDVRKMIAKSEQEIGKATAKYFFYSNIMNFFKTEITLANGEIRKRPLIETNGETGEIVWDKGRDFATVRKVLSMPQVNIVKKTEVQTGGFSKESILPKRNSDKLIARKKDWDPKKYGGFDSPTVAYSVLVVAKVEKGKSKKLKSVKELLGITIMERSSFEKNPIDFLEAKGYKEVKKDLIIKLPKYSLFELENGRKRMLASAGELQKGNELALPSKYVNFLYLASHYEKLKGSPEDNEQKQLFVEQHKHYLDEIIEQISEFSKRVILADANLDKVLSAYNKHRDKPIREQAENIIHLFTLTNLGAPAAFKYFDTTIDRKRYTSTKEVLDATLIHQSITGLYETRIDLSQLGGDAGDMRAANLWPSPLMIKRSKKNSLALSLTADQMVSALLDAEPPILYSEYDPTRPFSEASMMGLLTNLADRELVHMINWAKRVPGFVDLTLHDQVHLLECAWLEILMIGLVWRSMEHPVKLLFAPNLLLDRNQGKCVEGMVEIFDMLLATSSRFRMMNLQGEEFVCLKSIILLNSGVYTFLSSTLKSLEEKDHIHRVLDKITDTLIHLMAKAGLTLQQQHQRLAQLLLILSHIRHMSNKGMEHLYSMKCKNVVPLYDLLLEAADAHRLHAPTSRGGASVEETDQSHLATAGSTSSHSLQKYYITGEAEGFPATA

SEQ ID NO: 368 - protein, 2649 aa, Artificial Sequence
  Cas9 variant 29 linkers
SRADPKKKRKVTGAGDMRAANLWPSPLMIKRSKKNSLALSLTADQMVSALLDAEPPILYSEYDPTRPFSEASMMGLLTNLADRELVHMINWAKRVPGFVDLTLHDQVHLLECAWLEILMIGLVWRSMEHPVKLLFAPNLLLDRNQGKCVEGMVEIFDMLLATSSRFRMMNLQGEEFVCLKSIILLNSGVYTFLSSTLKSLEEKDHIHRVLDKITDTLIHLMAKAGLTLQQQHQRLAQLLLILSHIRHMSNKGMEHLYSMKCKNVVPLYDLLLEAADAHRLHAPTSRGGASVEETDQSHLATAGSTSSHSLQKYYITGEAEGFPATAGGSPRGGSAGDMRAANLWPSPLMIKRSKKNSLALSLTADQMVSALLDAEPPILYSEYDPTRPFSEASMMGLLTNLADRELVHMINWAKRVPGFVDLTLHDQVHLLECAWLEILMIGLVWRSMEHPVKLLFAPNLLLDRNQGKCVEGMVEIFDMLLATSSRFRMMNLQGEEFVCLKSIILLNSGVYTFLSSTLKSLEEKDHIHRVLDKITDTLIHLMAKAGLTLQQQHQRLAQLLLILSHIRHMSNKGMEHLYSMKCKNVVPLYDLLLEAADAHRLHAPTSRGGASVEETDQSHLATAGSTSSHSLQKYYITGEAEGFPATATPESGADKKYSIGLDIGTNSVGWAVITDEYKVPSKKFKVLGNTDRHSIKKNLIGALLFDSGETAEATRLKRTARRRYTRRKNRICYLQEIFSNEMAKVDDSFFHRLEESFLVEEDKKHERHPIFGNIVDEVAYHEKYPTIYHLRKKLVDSTDKADLRLIYLALAHMIKFRGHFLIEGDLNPDNSDVDKLFIQLVQTYNQLFEENPINASGVDAKAILSARLSKSRRLENLIAQLPGEKKNGLFGNLIALSLGLTPNFKSNFDLAEDAKLQLSKDTYDDDLDNLLAQIGDQYADLFLAAKNLSDAILLSDILRVNTEITKAPLSASMIKRYDEHHQDLTLLKALVRQQLPEKYKEIFFDQSKNGYAGYIDGGASQEEFYKFIKPILEKMDGTEELLVKLNREDLLRKQRTFDNGSIPHQIHLGELHAILRRQEDFYPFLKDNREKIEKILTFRIPYYVGPLARGNSRFAWMTRKSEETITPWNFEEVVDKGASAQSFIERMTNFDKNLPNEKVLPKHSLLYEYFTVYNELTKVKYVTEGMRKPAFLSGEQKKAIVDLLFKTNRKVTVKQLKEDYFKKIECFDSVEISGVEDRFNASLGTYHDLLKIIKDKDFLDNEENEDILEDIVLTLTLFEDREMIEERLKTYAHLFDDKVMKQLKRRRYTGWGRLSRKLINGIRDKQSGKTILDFLKSDGFANRNFMQLIHDDSLTFKEDIQKAQVSGQGDSLHEHIANLAGSPAIKKGILQTVKVVDELVKVMGRHKPENIVIEMARENQTTQKGQKNSRERMKRIEEGIKELGSQILKEHPVENTQLQNEKLYLYYLQNGRDMYVDQELDINRLSDYDVDHIVPQSFLKDDSIDNKVLTRSDKNRGKSDNVPSEEVVKKMKNYWRQLLNAKLITQRKFDNLTKAERGGLSELDKAGFIKRQLVETRQITKHVAQILDSRMNTKYDENDKLIREVKVITLKSKLVSDFRKDFQFYKVREINNYHHAHDAYLNAVVGTALIKKYPKLESEFVYGDYKVYDVRKMIAKSEQEIGKATAKYFFYSNIMNFFKTEITLANGEIRKRPLIETNGETGEIVWDKGRDFATVRKVLSMPQVNIVKKTEVQTGGFSKESILPKRNSDKLIARKKDWDPKKYGGFDSPTVAYSVLVVAKVEKGKSKKLKSVKELLGITIMERSSFEKNPIDFLEAKGYKEVKKDLIIKLPKYSLFELENGRKRMLASAGELQKGNELALPSKYVNFLYLASHYEKLKGSPEDNEQKQLFVEQHKHYLDEIIEQISEFSKRVILADANLDKVLSAYNKHRDKPIREQAENIIHLFTLTNLGAPAAFKYFDTTIDRKRYTSTKEVLDATLIHQSITGLYETRIDLSQLGGDAGDMRAANLWPSPLMIKRSKKNSLALSLTADQMVSALLDAEPPILYSEYDPTRPFSEASMMGLLTNLADRELVHMINWAKRVPGFVDLTLHDQVHLLECAWLEILMIGLVWRSMEHPVKLLFAPNLLLDRNQGKCVEGMVEIFDMLLATSSRFRMMNLQGEEFVCLKSIILLNSGVYTFLSSTLKSLEEKDHIHRVLDKITDTLIHLMAKAGLTLQQQHQRLAQLLLILSHIRHMSNKGMEHLYSMKCKNVVPLYDLLLEAADAHRLHAPTSRGGASVEETDQSHLATAGSTSSHSLQKYYITGEAEGFPATAPAGAGDMRAANLWPSPLMIKRSKKNSLALSLTADQMVSALLDAEPPILYSEYDPTRPFSEASMMGLLTNLADRELVHMINWAKRVPGFVDLTLHDQVHLLECAWLEILMIGLVWRSMEHPVKLLFAPNLLLDRNQGKCVEGMVEIFDMLLATSSRFRMMNLQGEEFVCLKSIILLNSGVYTFLSSTLKSLEEKDHIHRVLDKITDTLIHLMAKAGLTLQQQHQRLAQLLLILSHIRHMSNKGMEHLYSMKCKNVVPLYDLLLEAADAHRLHAPTSRGGASVEETDQSHLATAGSTSSHSLQKYYITGEAEGFPATA

SEQ ID NO: 369 - protein, 2011 aa, Artificial Sequence
  Cas9 variant 18 linkers
SRADPKKKRKVTGAGDMRAANLWPSPLMIKRSKKNSLALSLTADQMVSALLDAEPPILYSEYDPTRPFSEASMMGLLTNLADRELVHMINWAKRVPGFVDLTLHDQVHLLECAWLEILMIGLVWRSMEHPVKLLFAPNLLLDRNQGKCVEGMVEIFDMLLATSSRFRMMNLQGEEFVCLKSIILLNSGVYTFLSSTLKSLEEKDHIHRVLDKITDTLIHLMAKAGLTLQQQHQRLAQLLLILSHIRHMSNKGMEHLYSMKCKNVVPLYDLLLEAADAHRLHAPTSRGGASVEETDQSHLATAGSTSSHSLQKYYITGEAEGFPATAGASGSDKKYSIGLDIGTNSVGWAVITDEYKVPSKKFKVLGNTDRHSIKKNLIGALLFDSGETAEATRLKRTARRRYTRRKNRICYLQEIFSNEMAKVDDSFFHRLEESFLVEEDKKHERHPIFGNIVDEVAYHEKYPTIYHLRKKLVDSTDKADLRLIYLALAHMIKFRGHFLIEGDLNPDNSDVDKLFIQLVQTYNQLFEENPINASGVDAKAILSARLSKSRRLENLIAQLPGEKKNGLFGNLIALSLGLTPNFKSNFDLAEDAKLQLSKDTYDDDLDNLLAQIGDQYADLFLAAKNLSDAILLSDILRVNTEITKAPLSASMIKRYDEHHQDLTLLKALVRQQLPEKYKEIFFDQSKNGYAGYIDGGASQEEFYKFIKPILEKMDGTEELLVKLNREDLLRKQRTFDNGSIPHQIHLGELHAILRRQEDFYPFLKDNREKIEKILTFRIPYYVGPLARGNSRFAWMTRKSEETITPWNFEEVVDKGASAQSFIERMTNFDKNLPNEKVLPKHSLLYEYFTVYNELTKVKYVTEGMRKPAFLSGEQKKAIVDLLFKTNRKVTVKQLKEDYFKKIECFDSVEISGVEDRFNASLGTYHDLLKIIKDKDFLDNEENEDILEDIVLTLTLFEDREMIEERLKTYAHLFDDKVMKQLKRRRYTGWGRLSRKLINGIRDKQSGKTILDFLKSDGFANRNFMQLIHDDSLTFKEDIQKAQVSGQGDSLHEHIANLAGSPAIKKGILQTVKVVDELVKVMGRHKPENIVIEMARENQTTQKGQKNSRERMKRIEEGIKELGSQILKEHPVENTQLQNEKLYLYYLQNGRDMYVDQELDINRLSDYDVDHIVPQSFLKDDSIDNKVLTRSDKNRGKSDNVPSEEVVKKMKNYWRQLLNAKLITQRKFDNLTKAERGGLSELDKAGFIKRQLVETRQITKHVAQILDSRMNTKYDENDKLIREVKVITLKSKLVSDFRKDFQFYKVREINNYHHAHDAYLNAVVGTALIKKYPKLESEFVYGDYKVYDVRKMIAKSEQEIGKATAKYFFYSNIMNFFKTEITLANGEIRKRPLIETNGETGEIVWDKGRDFATVRKVLSMPQVNIVKKTEVQTGGFSKESILPKRNSDKLIARKKDWDPKKYGGFDSPTVAYSVLVVAKVEKGKSKKLKSVKELLGITIMERSSFEKNPIDFLEAKGYKEVKKDLIIKLPKYSLFELENGRKRMLASAGELQKGNELALPSKYVNFLYLASHYEKLKGSPEDNEQKQLFVEQHKHYLDEIIEQISEFSKRVILADANLDKVLSAYNKHRDKPIREQAENIIHLFTLTNLGAPAAFKYFDTTIDRKRYTSTKEVLDATLIHQSITGLYETRIDLSQLGGDAGDMRAANLWPSPLMIKRSKKNSLALSLTADQMVSALLDAEPPILYSEYDPTRPFSEASMMGLLTNLADRELVHMINWAKRVPGFVDLTLHDQVHLLECAWLEILMIGLVWRSMEHPVKLLFAPNLLLDRNQGKCVEGMVEIFDMLLATSSRFRMMNLQGEEFVCLKSIILLNSGVYTFLSSTLKSLEEKDHIHRVLDKITDTLIHLMAKAGLTLQQQHQRLAQLLLILSHIRHMSNKGMEHLYSMKCKNVVPLYDLLLEAADAHRLHAPTSRGGASVEETDQSHLATAGSTSSHSLQKYYITGEAEGFPATA

1. An endonuclease-based gene editing construct, wherein the construct comprises the following components:
(a) a CRISPR-associated endonuclease or a derivative thereof; and
(b) at least one or more hormone binding domains of the estrogen receptor (ERT2) or derivatives thereof.

2. The construct of claim 1, wherein the at least one or more mutated hormone binding domains of the estrogen receptor (ERT2) are located upstream or located downstream of the CRISPR-associated endonuclease, wherein if there are two or more ERT2, the ERT2 are all located upstream, or all located downstream, or located both upstream and downstream of the CRISPR-associated endonuclease.

3. The construct of claim 1, wherein the mutated hormone binding domain of the estrogen receptor (ERT2) is SEQ ID NO: 4 or derivatives thereof.

4. The construct of claim 1, wherein the construct further comprises one or more selected from the group of one or more localization sequences, a binding tag, a self-cleaving peptide, and a selectable marker.

5.-7. (canceled)

8. The construct of claim 1 comprising the following formula (I): [chemical structure]
wherein A is absent or is a mutated hormone binding domain of the estrogen receptor (ERT2), or a binding tag;
wherein B is a localization sequence or derivatives thereof, or the binding tag, or absent;
wherein both C₁ and C₂ are present or only C₁ is present; wherein C₁ and C₂ are each independently selected from the group consisting of the localization sequence, derivatives thereof of the localization sequence, and a mutated hormone binding domain of the estrogen receptor (ERT2); wherein when C₁ is one mutated hormone binding domain of the estrogen receptor (ERT2), C₂ is another mutated hormone binding domain of the estrogen receptor (ERT2);
wherein X is a CRISPR-associated endonuclease or a derivative thereof;
wherein D is selected from the group consisting of a mutated hormone binding domain of the estrogen receptor (ERT2), the localization sequence and derivatives of the localization sequence;
wherein E is absent or is selected from the group consisting of a mutated hormone binding domain of the estrogen receptor (ERT2) and a self-cleaving peptide;
wherein F is absent or is selected from the group consisting of the self-cleaving peptide and a selectable marker;
wherein G is absent or is the selectable marker;
wherein L¹, L², L³, L⁴, L⁵, L⁶, L⁷ and L⁸ are linker sequences; wherein at least one of the linker sequences is present; wherein each of the linkers sequences is independently between 1 to 25 amino acids long; wherein each linker sequence independently comprises natural or unnatural or a mixture of natural and unnatural amino acids;
wherein, if any one or more of the linker sequences of L¹ to L⁸ is absent, the neighbouring substituents are bound by a peptide bond;
wherein L¹ is selected from the group consisting of PR, TG, TGPGPGGS, TGPGPGGSAGDTTGPGTGPG and TGGGS;
wherein L² is selected from the group consisting of PRGGS, GGSPRGGS, PR, GGSPRGGS and TPGGPRGGS;
wherein L³ is selected from the group consisting of PG, SGSEGA, GASGSKTPG, SGSETPGTSESAGA, SGSETPGTGPGGA, SESATPESGA, GTSESATPESGGA, GGSGGSGA, GA, GGGS, TPESGA, SGSETPGTGA, SGSETPGTSEGA, PAG, PAGGGS, SGSETPGTPGGA, TPESGPGGA and GASGS;
wherein L⁴ is GGGS;
wherein L⁵ is PAG or PAGGGS;
wherein L⁶ is GA;
wherein L⁷ and L⁸ are independently selected from the linkers as disclosed in any of L¹ to L⁶.

9. The construct of claim 8, wherein
a) A is absent, B is the binding tag, C₁ is the localization sequence and C₂ is absent;
b) A is the mutated hormone binding domain of the estrogen receptor (ERT2), B is the binding tag, C₁ is the localization sequence and C₂ is absent;
c) A is the binding tag, B is the localization sequence, C₁ is the mutated hormone binding domain of the estrogen receptor (ERT2) and C₂ is absent;
d) D is the localization sequence, E is the self-cleaving peptide, F is the selectable marker and G is absent;
e) D is the localization sequence, E is the mutated hormone binding domain of the estrogen receptor (ERT2), F is the self-cleaving peptide and G is the selectable marker;
f) D and E are each one mutated hormone binding domain of the estrogen receptor (ERT2);
g) D is the mutated hormone binding domain of the estrogen receptor (ERT2) and E is absent;
h) A is the mutated hormone binding domain of the estrogen receptor (ERT2), B is the binding tag, C₁ is the localization sequence and C₂ is absent, X is the CRISPR-associated endonuclease or derivative thereof, D is the localization sequence, E is the self-cleaving peptide, F is the selectable marker and G is absent;
i) A is the binding tag, B is the localization sequence, C₁ is the mutated hormone binding domain of the estrogen receptor (ERT2) and C₂ is absent, X is the CRISPR-associated endonuclease or derivative thereof, D is the localization sequence, E is the self-cleaving peptide, F is the selectable marker and G is absent;
j) A is absent, B is the binding tag, C₁ is the localization sequence and C₂ is absent, X is the CRISPR-associated endonuclease or derivative thereof, D is the localization sequence, E is the mutated hormone binding domain of the estrogen receptor (ERT2), F is the self-cleaving peptide and G is the selectable marker;
k) A is the mutated hormone binding domain of the estrogen receptor (ERT2), B is the binding tag, C₁ is the localization sequence and C₂ is absent, X is the CRISPR-associated endonuclease or derivative thereof, D is the localization sequence, E is the mutated hormone binding domain of the estrogen receptor (ERT2), F is the self-cleaving peptide and G is the selectable marker;
l) wherein A is the binding tag, B is the localization sequence, C₁ is the mutated hormone binding domain of the estrogen receptor (ERT2) and C₂ is absent, X is the CRISPR-associated endonuclease or derivative thereof, D is the localization sequence, E is the mutated hormone binding domain of the estrogen receptor (ERT2), F is the self-cleaving peptide and G is the selectable marker;
m) the linker sequences comprise of the amino acids A, E, G, P, S and T; or
n) the linker sequences consist of the amino acids A, E, G, P, S and T.

10.-20. (canceled)

21. The construct of claim 1 comprising the following formula (II): [chemical structure]
wherein B is a localization sequence or derivatives thereof, or the binding tag;
wherein both C₁ and C₂ are present or only C₁ is present; wherein C₁ and C₂ are each independently selected from the group consisting of the localization sequence, derivatives thereof of the localization sequence, and a mutated hormone binding domain of the estrogen receptor (ERT2); wherein when C₁ is one mutated hormone binding domain of the estrogen receptor (ERT2), C₂ is another mutated hormone binding domain of the estrogen receptor (ERT2);
wherein X is a CRISPR-associated endonuclease or a derivative thereof;
wherein D is selected from the group consisting of a mutated hormone binding domain of the estrogen receptor (ERT2), the localization sequence and derivatives of the localization sequence;
wherein E is absent or is selected from the group consisting of a mutated hormone binding domain of the estrogen receptor (ERT2) and a self-cleaving peptide;
wherein F is absent or is selected from the group consisting of the self-cleaving peptide, the mutated hormone binding domain of the estrogen receptor (ERT2) and a selectable marker;
wherein G is absent or is the selectable marker;
wherein L¹, L², L³, L⁴, L⁵, L⁷ and L⁸ are linker sequences; wherein at least one of the linker sequences is present; wherein each of the linkers sequences is independently between 1 to 25 amino acids long; wherein each linker sequence independently comprises natural or unnatural or a mixture of natural and unnatural amino acids;
wherein the linker sequences comprise the amino acids A, E, G, P, S and T;
wherein, if any one or more of the linker sequences of L¹ to L⁵ and L⁷ to L⁸ is absent, the neighbouring substituents are bound by a peptide bond;
wherein L¹ is selected from the group consisting of PR, TG, TGPGPGGS, TGPGPGGSAGDTTGPGTGPG, TGPGGS, TGPGGSAGDTTGPGGS and TGGGS;
wherein L² is selected from the group consisting of PRGGS, GGSPRGGS, PR, GGSPRGGS and TPGGPRGGS;
wherein L³ is selected from the group consisting of PG, SGSEGA, GASGSKTPG, SGSETPGTSESAGA, SGSETPGTGPGGA, SESATPESGA, GTSESATPESGGA, GGSGGSGA, GA, GGGS, TPESGA, SGSETPGTGA, SGSETPGTSEGA, PAG, PAGGGS, SGSETPGTPGGA, TPESGPGGA and GASGS;
wherein L⁴ is GGGS;
wherein L⁵ and L⁷ are independently PAG, SGS or PAGGGS;
wherein L⁸ is selected from the linkers as disclosed in any of L¹ to L⁵ and L⁷.

22. The construct of claim 21, wherein
a) the linker sequences comprise of the amino acids A, E, G, P, S and T;
b) the linker sequences consist of the amino acids A, E, G, P, S and T;
c) B is the localization sequence, C₁ is the mutated hormone binding domain of the estrogen receptor (ERT2) and C₂ is absent;
d) D is a localization sequence and E and F are each a mutated hormone binding domain of the estrogen receptor (ERT2);
e) A is absent, B is localization sequence, C₁ is the mutated hormone binding domain of the estrogen receptor (ERT2), C₂ is absent, X is a CRISPR-associated endonuclease or a derivative thereof, D is localization sequence, E is a mutated hormone binding domain of the estrogen receptor (ERT2) and F is absent;
f) B is a localization sequence, C₁ is the mutated hormone binding domain of the estrogen receptor (ERT2), C₂ is absent, X is a CRISPR-associated endonuclease or a derivative thereof, D is localization sequence and E and F are both each a mutated hormone binding domain of the estrogen receptor (ERT2); or
g) B is a localization sequence, C₁ and C₂ are each independently a mutated hormone binding domain of the estrogen receptor (ERT2), X is a CRISPR-associated endonuclease or a derivative thereof, D is localization sequence and E and F are both each a mutated hormone binding domain of the estrogen receptor (ERT2).

23.-28. (canceled)

29. The construct of claim 1, wherein the CRISPR-associated endonuclease, or derivative thereof, is selected from the group consisting of a wild type CRISPR-associated protein 9 (Cas9), a mutated CRISPR-associated protein 9 (Cas9), wherein the mutated CRISPR-associated protein 9 (Cas9) is functional; a wild type Cpf1 (CRISPR from Prevotella and Francisella 1) protein, and a mutated Cpf1 protein, wherein the mutated Cpf1 protein is functional.

30. The construct of claim 29, wherein
a) the CRISPR-associated protein 9 (Cas9), or derivative thereof, is selected from the group consisting of Streptococcus pyogenes, Streptococcus thermophiles, Listeria innocua, Staphylococcus aureus and Neisseria meningitidis
b) the CRISPR-associated protein 9 (Cas9), or derivative thereof, has at least 95% sequence identity to SEQ ID NO: 1;
c) the Cpf1 protein, or derivative thereof, is selected from the group consisting of Acidaminococcus, Lachnospiraceae, Parcubacteria, Butyrivibrio proteoclasticus, Peregrinibacteria, Porphyromonas crevioricanis, Prevotella disiens, Moraxella bovoculi, Smithella, Leptospira inadai, Francisella novicida, Candidatus Methanoplasma termitum and Eubacterium eligens; or
d) the Cpf1 protein, or derivative thereof, has at least 95% sequence identity to SEQ ID NO: 2 or 3.

31.-33. (canceled)

34. The construct of claim 1, wherein
a) the localization sequence is selected from the group consisting of nuclear localization sequence, mitochondrial localization sequence and derivatives thereof, optionally wherein the at least one or more nuclear localization sequences (NLS) are selected from the group consisting of Simian Vacuolating Virus 40 (SV40) Large T-antigen, Nucleoplasmin, Importin α, EGL-13, c-MYC, TUS, AR, PLSCR1, PEP, TPX2, RB, TP53, N1N2, PB2, CBP80, SRY, hnRNP A1, HRP1, Borna Disease Virus p10, Ty1 Integrase, and the Chelsky consensus sequence;
b) at least one or more nuclear localization sequences (NLS) are monopartite or bipartite NLS; or
c) at least one or more nuclear localization sequences (NLS) are classical NLS (cNLS) or proline-tyrosine (PY)-NLS.

35.-40. (canceled)

41. The construct of claim 8, wherein the binding tag is located at either the N-terminus or the C-terminus of the construct, or at both ends of the construct.

42. (canceled)

43. The construct of claim 8, wherein the binding tag is selected from the group consisting of a V5 epitope tag, a FLAG tag, a tandem FLAG-tag, a triple FLAG tag (3×FLAG), a Human influenza hemagglutinin (HA) tag, a tandem HA tag, a triple HA tag (3×HA), a sextuple Histidine tag (6×HIS), biotin, c-MYC, a Glutathione-S-transferase (GST) tag, a Strep-tag, a Strep-tag II, a S-tag, a natural histidine affinity tag (HAT), a Calmodulin-binding peptide (CBP) tag, a Streptavidin-binding peptide (SBP) tag, a Chitin-binding domain, a Maltose-binding protein (MBP) and derivatives thereof.

44. The construct of claim 43, wherein the V5 epitope tag sequence is SEQ ID NO: 12 or a derivative thereof.

45. The construct of claim 8, wherein the self-cleaving peptide is a 2A self-cleaving peptide or a derivative thereof.

46. The construct of claim 45, wherein the 2A self-cleaving peptide is SEQ ID NO: 13 or a derivative thereof.

47.-50. (canceled)

51. The construct of claim 1, wherein the construct has at least 90% sequence identity to SEQ ID NOs: 15 to 74.

52. The construct of claim 1, wherein the construct has a sequence selected from the group consisting of SEQ ID NO: 37, SEQ ID NO: 74 and SEQ ID NO: 249.

53. A nucleic acid sequence encoding an endonuclease-based gene editing construct, wherein the construct comprises the following components:
(a) a CRISPR-associated endonuclease or a derivative thereof; and
(b) at least one or more hormone binding domains of the estrogen receptor (ERT2) or derivatives thereof.

54.-56. (canceled)

57. A method of editing a genome of a host cell using the construct of any one of the preceding claims, the method comprising:
(a) transfecting the host cell with a nucleic acid sequence encoding an endonuclease-based gene editing construct, wherein the construct comprises the following components:
(i) a CRISPR-associated endonuclease or a derivative thereof; and
(ii) at least one or more hormone binding domains of the estrogen receptor (ERT2) or derivatives thereof; and
(b) incubating the cell of operation (a) with an inducing agent.

58.-64. (canceled)
